United States Patent Application Publication US 2021/0283234 A1 - sequence listing, part 2

SEQ ID NO: 1 - DNA, 4846304 bp, Artificial Sequence (residues 1,615,436-3,230,870 of 4,846,304)
  GenBank No.: CP015157; Salmonella enterica subsp. enterica serovar Typhimurium strain NC983 chromosome, complete geneome
ttgatctggatcacgtttaatgacagtgctttttcaccagctgaagataatcatgatcgttagaccacaacagcactggattcgcctgatatttgtctggcatggttccgtgttatctaaaatcttttcacgactactccttaactttcttctttctatcgccgttattatcatgctgccctggtacacaatgctgggtattaagtttacccttgcgccgtttagcatactgggcgtcgctatcgccatttttcttgggtttcgcaataatgcctgttatgcgcgttacgtcgaagcccgacatttgtgggggcagttgatgatcgcttcacgctcaatactgcgagaggtgaaaacaaccttgcctgatgaacgcggtatcgaggattttgttcggttacaaatcgcttttgcccactgtttgcgtatgacattgcgtcgacagcctcaaacgcaagttctgggaaactatcttgaccaggaggcgttacagaaagttgtcgcttcccattcccccgctaaccgtatcttattgctgatgggagagtggctggcgattcgccgccgcagcggaaagctttccgatattttatttcatagcctcaacaaccgcttaaatgatatgtcgtcagtattggccggctgtgagcgcatcgccaacacgccggtgccttttgcctatacgttaattttgcatcgtacggtttatcttttctgcattatgttgccatttgcactggtggttgatctgcactatatgacgccgtttatttcggtgctgatttcttatacgtttatcgcgctggatgcgttagcagaagagttggaagatccgttcggtactgaaaataatgatttaccgctggatgcgatatgcaatgcgatagaaatcgatttactgcaaatgaatgatgaaagggatattccggcaaaacggataccggataaacgctatcaactgacctgagctcgacttaactggcgcagaatgttcatctgcgccataacctgaatagcaaagtttaatagccttctccaacgccggttttggctggaccggagtagtggacatgaacgattcgccatcctgtgtttggtatcttcgcccacacctggctttcgcggcctgtcgtgtgttgagtctgcccattatcacggcgtaccgcggtaaaatgccagtcgaactctgcaacggcggcattgccatacacatgaatagcagggggagcgtccagttttaatgtgcgtttgctgaaggttttacccatagtggtgccataaaaattttcagcgatctgcgaccatccgcgttcgtgaccgcgtggatgaataaaactggtttccggtgaaacataaaagagctgcttgcctaacgttgggtctgccttatctattgaataaaggtaacggttaatgccttctgtaatttcttgtttaacggtcgacgtagcttcattttgtgcggcggttggcgttgccgctgatgccgatgacgccatcagagttaacgttatcgcggcggccgaaaacaatagtgacgttttttgcataatagttatacccatatggtctgtttttgagacgctttatctttcctgttacgttcacctttatactaaaggagcatggctcacgaacaataaaaaacatccttctataaaactaccccgaaaagggagtagtgcaattaagaatatcgtatttgtttgtaacggcatgactcaaaatatcaacatttagagtttcagtattgttgttgtccattgacttacttttatttttattaccactggtaaatagttaatcttatgaatagtgatacacaaatgaccgtttgcgctatgtgataattaaccatagtaaaaatacacgaagcgaagaagtgctatttcagtagtactgatattttcataacgctaatttaaaaataaatgtaaacgtaacaaattatacacaaaaataagaagggctgtggcctcaactgactggattatgattccgtcttaccgaatgtcagccgaatgttcagtgccattctcgccctggcatccccgaccgtaagcctgttctctactggtaacccccttgttattacagcagaaaacagggcatatcattgatgtagtcatgcttaacttgcattttaacatcactaatacatagcaagctaatattacactttgaaacttaacgcacggtaattgttagtgatattgtcctggacagttccgcgagcaggctttgcggaaagtccaaaaataagacaaataaggcatataaaatgaaaaaagtagtggtgttatctgcggtagccgcagccgtaatgatggctggagccgccaacgcagcagaaatctataacaaggatggcaataaactggatttgtatggcaaggtcgacggcctgcattatttttccagtaatcatagtacggatggcgatcaatcttatatccgtatgggtattaaaggcgagactcaaattaccgatcaactaaccggttttggacagtgggagtatcaggtcaacgccaatcgtccggaagatggtgactccagcggttccccgcaaagctggacgcgtctcggttttgctggtttggcatttgccgatatggggtctgttgattatggtcgtaactatggcgtgttatacgacattggttcatggactgacgtactgcctgaatttggtaatgattcgtatgaagcttccgataattttatgaccggacgcgcgaatggcgttctgacttatcgcaataatgatttctttggtctggttgatggtctgaatattgcgttgcagtatcagggtaaaaatgacggcctgtcgaaagaaggcgatcctttaagtaataatgccagaaaaagtatcgcgtaccagaatggcgatggtttcggggcatcagcgacatatgatttgggcatgggggtgagcctgggggcagcctataccagttccaaacgcacgcttgatcagatgacgcaagataaatacgacaatggcgaccgcgctgaagcctggactggcggcgtgaagtatgatgccaataatatttacctggcggcaaactatacccgtacttatgatatgacctatatgggcgatacattgggcggctttgcacataaaaccgataactgggaaatggtagggcaatatcaatttgataatggcttacgcccgtcactggcgttcctgcaatccagagccaatgatgttgatggactgggttcgttcgaccttgtgaaatatattgatgtgggttcctactactacttcaataaaaatatgtccgcgtatgttgactacaaaatcaatctgctaaaagatggcaacccatcgaatcctaatacagacaacaccgtggcgctcggcttagtctacgagttttgataaaacttgctgattaagacagtttagggataccctccttttcccaaaactgtgtcactgcttaacctttattattgttaatttattcttttattatttcaggacgcttctggcgtccttttttattgactattcgttgactattcgacttcgatctcgcgaatgcgcattctgctactgtcatctatctgcactttgcctgaatgacaaaggggacaacagagtgtggatgtttgagaggtgaagggttgattacaggacagacaccaaccttgcgccggtgcgatagtaatgtggaaacgcgcattgtcagcaagggtatgacgagcggcgacgtccaggccaaaatgcagcgccggcacctcaacacaggccataacgccaatctccagccagacttgctttaccttgctgaactggtgatttactgcctgttcctccagcaattcgataatattttgcgccagggctaattcatgcatgggccagctccttcattcaacaatatttacggcgacacaaggatcaattacctgtaactgttgcgaccacaatgagagtggaatagtggccagttcgcgagcaatgacgccgtcaggttgggcgtgacgtgtggtaggcgagataatacggtaatcaagaatattgcctgacgtcgtcagtctggcctgatgaactaaccatcctcgcgcggtttccactaccgctattttccattcgccatcatcaaaacgattccagcgcagggtgggaagggcgctcaaacttcgggcgagcgtaatgcagcgggccagcagacgtagcgcagtcgttttaccgctaagacaacaggctgacagcagcggatattcgatagccagaggcgagacatccaggggaccatgggttattaacgtatggtccggggacgatgccatcggtagtgtaggtgtaatgatattctgtactgccgccagccagcgggcggtttcagaacgctcttgcaaaaaccaggcttcccagccctttacgccagcggcaagccaggtctgaggatcatcgtcaaaaaagattgtgcttgccagcggggataactctccgcgacgtaacaacgcccattcttcagcggttgcctgtcggtggctaaacagggggagccagtctgtcaacgcgcgacggagcgtttctcgcgccagctcttgttgtgcggcctgcatatctggcttcttttcaggaaacaacagtaaagccgccgccgcgctgtgcgcctgagcgcacaacgtaaacaaacgtgaaataagcgtttttgcgtataccggcgttgcgccctgtaacaaacgaccgatcggcgcctcctgccagataatccgtagcgggtgagaatagacggtcaatctttgcacgaactattaccttcatcgatcaccataaacccggacttactggtttcgcaaaccggacagcaccagtaatcaggtaactggttgaagggcacgccgggtggaatttgccatacatcatcgcccagcgcagggtcgtaaacccaccaacatactttgcactccatgcgcaccactggctcattttctgtgaccgggtattctttcaaccattccaacgtattttttagccccgcgtaggcatcttcaatatcgtcgatgcctgcaacggcgatatcaggaatgtccgctatctcaatcatatcttgcagtaatgtattcatatcattgaaatagttgacccgccatacgccgggaaaatgcgtgcttacaatccggcatttaccatatccgcgtgaaaaaatagcgctacagccttcgcctaaaaaatgatccagatactcgcgatcggcatcgtttactggcaacagcgttaagttaatgatatgtggctcttttaccggctgttttacgcgctcggctatttcatgcgcgataaaggcgccattcatcaatcccgccggttgtggcggcaattctggcgtaatcggcggctgcggatgcgtctgccagatgctctctgggatcgggccaatgataatttcatcggcaacccgttgctggtcagcgttatattcacgcacacgccagacgcccgtaaaaaccgtctcctgaatacgctgttcttttccatcggataatagtacccgggcggagatttcaccttcgccgagcagttgatccaataaaccgctattctgttgctcagtggcattcagcttatagctcaggggaaaggggagcgttgccaccgggttatccatatcgcgaataagcgtagtcaggatgtgtctggcaacacggagctcagcgggcagcgcctgttccggtaaaaccggcgtcagcgggagattaatgccggcggggatgggaagaaagttaaagtcttcctcttctggctgcgatcctggtccggcaatattaacgactggaatagttctggaatgattcacgtgtgttacctttcattctattgcgtgataacgggaatatcctgacgatagcccggtgtggtcagcaatgcggccacccgctgagagtattcttgccagctatataatcccgccagactgccgacaaaacggtgctggcgaaagaaaagcagcgccggatatttcagaatgcgatactcccgggcgatcagttcactctgttcgctatccgcaaatgccgcggtataagacgtcgccggaaattgcttgaggatctccgggatgatgacccaactgtcggcgacttccggatgtttgttggggtcgctttgcagcaaaaccagcagagtcggatgcgcattaatcaacgacgggagcgtttgcgcatcggtaaccagaaagcctttatccgccagtggacaaacaggattttggggtgagatagtcatttttttaaatgctccggtaattcaggcgtgcgagacaataaatcggcaaaaccggtcagcggatcgctttgcgtgagcatggcctgttccagtgagtccagcgccgccagtacctcagcggcttccgcttcgtccatttctcgtcgtgctgcgccgccaaatgtcagcagccatgcgcctgctaaggggggagccacaagccgaatatcaacgtcgataagctcgccgtgtcggtcgcggcatttggcgaaccactgaccgggtgaaataacctgcacaggaacgccaatacacattatgatttctctctctgtagcacccgaatatcgccgacccggcaagcgctttgcgcatctgggcgttcatcttcgtagcgttccatacacaggctgtaatgattgagtctttcagtgggcaaggccgctgaagaggcggtgataccccattgcgccagcacttcctgcgcgagatagaccgcaggcatcagttgcgcctttacctgcggcgtaagactcccgccatagtcatccagacattccggctgcacgccaatcagcacaatctccgataactggccgccggttaattgcagcaatgccagcacttcagaaaaactggtctgatgtaaactgagttttttcgccgtcagataggcgggaacctgttcatcacgaaacatcgccagcgaacctggcgccataccaaaatcgatagcatccatgattaacagtttttcggtctgttgcagccagggcagcagcgccagcccctgcgtaccgccatcaacaacgtcaactttctcgttatcggcatactgttcaaacagcttttccgccgctctgacgccgaacccttcatctgcccaaagcaggttgccaagccctaagattgttacttctgccattgttatcacctgaaccagcgccagccgcttatcatgacggaaatcacgctttgtcggctcataatgtcttcgcggatagcggtataaacatgcgcaatgacgaaggcgataatgaaccacatgcccagccggtgccagaaatgcagcgcgaggctatcgttgccagtcaggcgaatcatccagccaaaccattgatacgcccaactgtctgttccaagtccttcgccatagagcgcaaagccgctacacaccatcagtacggacatccagaaatagaacattaccgccagtcccgctaccggattatgtccatagtaacgatgggcctctttttcgaggaaaaaataccagcggatttcgctgataacgcctttgcgccaggcgcggcgccagaacggaaccagaaacatctccctggcgtactcattgccgacacatgcccagtaaatacgaaacagcagcgcgacagtaaaaatatacgccgtggtaaaatggatcagtcgtatccagcccatccaaaacataaaggtcgcttcaccttgaatcgatggcagggggcggccaatgaaatatcctgtaacagccaggacgacaatggataacgccgtgatccagtgccataaacggaccggcgcttcatagatatagtacccctggctggttatttctttgagatgcattgagacctccgaatcgtcgtcatcgtacctgaaccctgaccagctcccctccatgattatcaataacatgggtggagcaggccaggcagggatcgaagctgtgcagagtacgtaaaatctccaatggttgatcgggaacggcgagtttagtccccattaacgccgcttcgtacgcgccaatttgacctttatcgtcacgtggcccggcattccaggttgtcggtaccacacactgatagctgtcgattttctgatttgcaatttttatccagtgccccagcgcgccgcgcggcgcctcgctgaaaccaacgccttttgccgatgtaggccaggtatcgggttcccagagcgtgacgtttgccgtcgccgtatcgccggacttgaggttacgcatcagacgatcgaagaaatattgcagcgtattgcctgcccatacggattccagcgcacgcgcggcagtacgtcctaatgtagaaaagagcgcttctttaggcagctttaatacactcagcagttgatccacgggttctttaaattccggtttattttgatgatatccaatcagataacgcgccagcggacctacctccatcgcatgtcccttccagcgcggcgatttaatccatgaatatttagcggactcatccacctgttcgataaaggtttttgtgcctttatagtgttcgcccatgaccagttgcggttcggtcagaccatcccacggatgcaggcccttatcgttattgccgttaccataggtataccaggagtgagtgacaaactcctgaatctcatcgggggcggttaaatcgacaggatgaatttcgtcgaaacgaccgttaatgatagccccacgcggaagcagaagattactggcggaataatcgttagggttatccggaaactcgccataagccagcaggttcatgctcgataacccgccgccgatttttgcccagtctttgtaataactggcaatcagcaagacgtccggaagataaacctgttcgcagaactggcgagctttttggatgatggaactgacaaggttcaggcgttccatattcactgcgccgaccgcgcccgtttcgtcaaggttgatggcgcaaggaacgccgcccaccagccagttaggatgcgggtttttaccaccgaaaacggtgtgaatttttacgatctctttttgaaaatcgagcgcttcaagatagtgggcgaccgccagcaaattggcttccggcggaagtttcatcgccggatgtccccagtagccattacggaaagggccaagttgaccggactcgataaaccgcttcagtcgattttgcaaatcgcggaaatatcccggcgaggatagcggccatgcggaaaggctttgcgcgatggcggaggtctgatgcgggtcggctttcagggcggcaaccacatcaacccagtccagcgcgtgcagatgataaaaatgcaccaggtgatcgtgaacgtgtagcgtagcctgcatcatattacggatacagtttgcgttgtccggaatcgcgattcccagcgcattttctacggcacggattgaggtcagagcgtgtgtaccggtgcagacgccgcaaatgcgttcaacgaatgcccaggcgtctcgcggatcgcgacctttcaggataacctccaggccgcgccacatggtgccggtcgacacggcgttagtaatgacattattactgtcgatattcacttcgcagcgcatatgcccttcgatgcgagtaaccggatcgaccacaattcgccgtccgctattgtccagcgtaaaaccctgagtctgataaggatatgccataattattttttctcttccggagcgttttctgatgacgtgttgtttttattgcgggcatgttttatggcgctcaccgtggcgtgagcgatggcggcagcgcccgcgacgccagcaacgcccagtccgattttatcggcggtagcctcaatgccggtttgcggaatgcccgttgcccggctgtaaaaagaaccgtaatcccagaatccatcttccgaacatccgaggcatccatgacccgactggataggaaaagacacgccatcattccagcgaacggttgaacaggcgttataggtggtcgggcctttacagcccatcttgtacaggcaatacccttttctggcgccttcgtcatcccacgcttccacaaactgaccggcatcgaaatgcgcgcgtcggtaacatttgtcatgaattcgctggccataaaacatttttggtcgtccaagacgatcaaggggagggatgcgatcaaatgccagcatataggtgataacggcggacatcacttcaggtataggcgggcagcctggcactttaataatgggtttatcggtaattaacttgtgaaccggcgtggctttagttgggttgggacgggctgcctgcacgcagccccatgatgcgcaggacccccaggcgataatcgctttagcatccgcgctgacgcgttttaacttctccaggaacggctcgccagccagtatgcaaaacatcccatcttcattcagcggcgcgttaccttccacagcaacgatataatttcctttgtactcacgcatcacatccgccaacgcctgctcagcttgttgccctgcggcggccataatggtgtcgtcataatccagggaaatgagcgacaaaatggcatcttttgccaacgggtgcgcagagcgaatgaaagattcggtacagcaggtacattcaagaccatgcagccatatcactggcgtacgcggtttattctccagggcataagctatttgaggaatcatcgaactgctcaggcctaaagacgttgcggtaaggctgcaaaacttgaggaagctacgccttgtcacgccgtgtctacgcataacttgataaaatgtatcttgtgtttgcataacgtttatcccaaaccactatagttagtgtgggcatcatatgttgcatttcttgtctttctcaacgtgttttagtagcaattatgtttctaattcgtaacaactgattacatgtgtgctactcacattactcaaaaacataaattaatttaatgttattggtgatgttgagtaaatatagcgttgtgatggcatctcttaatgttgataagaaaccgtgttttttatttataacatgatgggatttttttaaatggtcacacggataacgcgttttcatgttagctcgctctgtttaactctcctttaaacccgtcagttaaatttattagcttgtaaaataagatcacaattaattacgtgctgcataaccattgataggtttaatttaatatattcatccaatccattttacaaacaaggagagcatgatgaaaaaaagtaaagcaatgttatttatcgctccggcgctgttttcatacgccctggcggcacaggcctgcacgacccttgctattcaggataaacaaggcgatatttttcatgggcgtacgctggaatatatgcaggatttaccctcatggttaacgtattacccggcgggaacacagtttgataaaaaaacgccggatggcagccaggggataagctatcaggcgaagtatccgatactggccattacttccaccattactgatggcgatagcagagacatacttgaaggcatgaatagcgcgggattgtcatttagtgaaaacatgatcatgaatgcgcagttgccgccattgcccgcgagtgaatataaacaggcaattcctgtcacctcgttgggagaatgggcgctggcccgttttgctactgtcggcgaggtaaaacaggcaataaaagagggcaaattctggtcaccagaactgcatcggtttggcgatctgaaatcgccatttcattacgcgttttacgacaagaaaggaggaagcattgtcgttgaagtggaaaatggtaaattccatgtctatgacaatcccactcgcgtgatgacaaatggtcccgcattcccctggcatctgacaaatctgaataattatacgcaattaaccaatgtggaccgctcttcaggcacactgggcgggataaaagtgatgcagcctgatagcgggattgctattgcagacttgccatcgtccgatacgtcggtttcccgttttatacgcggcgtttattacaccacatatgcgccgcaagcgacatccgcccacgatgcaatgaatacgcttgcgcatattatgagccgtttcgatcgtccgaaaaatattacggttgattatatggggagtgaaggggaaggcaacgccacccgcaaaccggtctcagaatatacggtctggacaacgctgtctgacttaatgcacggtgagatgatggtgcgcggctacaatgatatcaactataaaacctggtctctttctcagtttaagaacgcgacagcgcccgtgttcgagaaaatcaacgtcaaaggataaatagctcatctcggtttagtttccccggtagtctcggcgaaggtaatggagactaccggcggttgcttctctttatcatgcacggtaattaattatcacgatcaccagcgccaggatggtatgctaaatccattcaaaatcccctggatatggattggagggcgcatggttatacctgaggtcaggcaggagaggctctatcagaagatagccaacctcatcattaagctgatcaatgataatatttttccaccgggaacttttttaccgccagaacgcgaactggcaaaacagcttggcgtgagccgcgcctccttgcgagaagcccttattgtactggagatctcgggatggatcgtgattcagtccggtaatggggttatcgtttcagataaaaaacaccttgccagcgactataccatcgaagaaattctctctactcgcgagctggtcgatagccattgtgcgcgcttagccgcacaaaacgataacgttgacgtcatcaaccaaatagaggcgatttatcatcgtatggatcaagccattaacgataataacgtccacggcttttactcgctggataaagagtttcaccttgcgatctctgaggccagccgtaaccgggtgttgttcgatatgtcccgtatgttatgggaacaacggattaatatcccttatgctgggctcgacgagcagtctggagacagaaatgttttacttaatctcaacaaacaacataaagcgatagtggatgcgatgcgacagtctgatgctgacagcgcctatgagggatcgctggaacatttacgctatgtgagaaagattgtcggcggctaattttgtcgatgaataacaccgcatggcggtcatgccatgcggtggagcttgccgtaaatcaatggaaaacagcattaatctttaagtagcgctccggatagcgatcaagttctttaactgcatcagggatctcatcaagattgacgaccttactgacgacatcttgcggattaatctccagcgtagacagcatacgtaatgcctcatcaaattcaccggcactggtgcgggaaccgcgtaaatccagttctttataggtgatcaggttcgtcggcagcgacgtttcctgttttggccatccggtaaacgaaatacgaccagcaaacgatgctaaatcaagcgtatttcgaatagcgctatttgcgccggaagcttctatcacgacctgcgccatggtgccgtgggtgatatttttaatagcgtcgataacctgatcgtcagcggcgttcagcacataaggaacgccaagcttttgcgcatagcgtagcctttcttccacaatatcgatcagaataggcgttgccttgtaatgacgcgcgcttaatgccgccataagaccaatggcccccgcgccgatgatggcaacatattccccggccttaacgtttgcccgatgcaacgcgtgcagagcgatggtcagcggttctgccagcggcgccatttcagaaggcacattatctggtattttatgaattaaatgtgcgggatgagtaaccacctcctgcattgcgccatcgacatgcacgccaatgacgtttaaattttcacaacaattagttctgccgacagagcaagggtagcagtgaccacaataaatataggggtcaacaattacgcggtcaccttctttaatattgtccggcattccggcgccttcctgaagaacaattccggtcacttcatgcccaataattcttgggtaagtaaccagtgggttcgttccacgaaaagccccgatatccgatccgcaaatgcctgcagcatcaaccttaattaatacttcattttctttcttatggggataatccacccagcgggtttcaacttcaccaggcttattaatgaacacagctttgactttcattggctttgaatcctttactttttacaaacacgaagaccaacaggcttgaaacgatagcgatagcaccagccagatagaacgcatagtcatatttaccgctaaattgaacgataaaaccggtgacaagcggaccgataatgccggatatattagccaggccatgcatggctccgccgacgctccctaccttatctttatgaacaacatcctgaataaccgcccaataaattgggcccgttaaatagagcaggaagagtgaaactgacatgagcgtaattgcgctaccaatagtgctaacagtaccggaaacggcaacacataccgctgcgcctgccagacatacgcccagaataagtcgacgtgagagcagagcattaccggtaatccgataaattacatcggaacagacgccgccgagtaccataccaatggcgccgatgacccagggaattaccgtggcgatactaatttctttaatatcgagatgtaacgaatggttcaggtaacttgggaaccaggtcaggaagaaaaaaagaatatagttgtagctgaaaaaagccagagttgtcgcccataccattggttgtttcatgtaatagccgagtgaaggcgtagcccggccatcatcagataaaataacgtcctcatgattttcaaaatcaatgcgttcttccggcgccaggcgtttactcattgttggcttatcgctaacgataaagtaccacagtagtacccagaccaggccaaataagaaaataatgccaaatgcggggcgccagcctaaggataacgccaacaggcccacaatcggcccggacaccgcgccgccgagcggggaaccggcgctaaaaattccgatcgccgtggcagactcctttcgggaaatccagttattgatgattttatttccggcagcgctgaccggcccttcagccataccgaaaagaacgcgcacgataagcattgtccacaatccggtgactaaaccagttaagccacaaaatacagaccatagtaacgctgcgatgagaaaaaccgtttttggcccaactttatcgctggcccagccaccaataaaattaaacagggcgtatccgataaaaaacgcgctgaagatcatccccatctccgcggcgttaaatcctaactccttttcgatcaagggggcagttatcgacaatgctgaacgatccatatagttgagcatgtaaactataaatagaagaaaaacgataagccatcccattgtttttcttttcatgattaatcctcttattgtggtctagcggcctgaccacaatattttaaggttattttcaaatcacctctcttgtggttagaacgtgatcaatataacaaaaatttatcacaggggatttttatccatcgcaagtgtgatggattaaattctttaaaatcagttgattaattgaaaattcaatcggagctatcgttttcccctaatccacgccccggtaaagtttgacatgcggcgttaacggaaggtggcgctgtctgtgggtatttttcatcgggcgtaatataaacctgactcgtggcgacatagccatcattaaaagttgcttcgatataggtagcttcccaacctgtcttcggttcatttagcgtaatactgatcttattgttgacgggactatctattgtaagcggctgatagcggataccacaggcataacgaaaatcacgcgcatttggattgttggctgtccagcgaacgacttttaccggcgcttctgagaaatagaccgtaagaaggtggtggtgaataaggtcgatcaactgtggtaatgtttttttactttgaaaccggttaataaatggaacgaggcttccttcagcgaactggttaattgagtagtggttcatattaggcactatacgtaatgattttacgccaggaagtttgctataataaaagcgagtgttgtctggtacgaaaaaatcatcgccacttgcattaataatatatttaggtattgcaaggcggggttggtaaatagtgttgagatatcttaacggatctattatttgccttagctgggtaaatgcgggggattttattttctcatctatgccttgctggtagtaggggtagaatgtaatgggccaatttccaccgtatgattgataaatatgctcaagtgaagcatcaatatcaagtagatcaatggcgaagggaacaattgcttcaacatcaggatcggcaatagctgacaaccaggtggtccacccacgctttgaaatacctgtaatgataaaggaatttatattccattgcgttaactccttttttgctaatctcatcgcttgcgatatggcagtgaccataggaatatttaaaggcattaacttacgttgctccggcgcttccataaataatgcccagcttcgggaaacgctttcgtcctctttcagtggttttttatcatcctgaaaggttaaatattggttaggtatatcactcactgatattacgatggtattcgtatcacgggagatgcttgccagtgtttcctgggggaaatcaccgggtttaccagtgatttgtacgcctttatcataattaattccgttgtttacaaccaccaaagcatggtgctcttttgccgtttcagggatataaatatcaacgttatgtcgccattgcgcaggggttaccatgtcatctggcgaccagtgttgcgataataattcatagtgtctgactaccacctgtgctaatggagctgtattaatcaaggtatattttagcggtgtgcctgaaatctgctcccggtagtcggggagaacatgagacaaatcacactccgggctgtttcgacaaaagaagatgttgttatgaagtagtgtataaacttttgtagaaatgaaaaacagtacgataacaacgagatatatttttttcatgctttccccgcgctttacaagggcaaatgccagccagcataatttccataaatacctcttaaacattcaatataagtacaatacttttgataaataacggaagaagggaacaataatgtttgtgacgttgtcacattattctgtttctggtttcactattagcactgaactttttgaaaggtaaatcattgccgtcaccagaccaataatggcgacagagatagctataccgatccagacgccatacagagcataacccaggacaaatccgcccaatacgggggatataaaatcagcgattgcgattaatgcctgcgccgttccgatgacgataccttgtcgggcaggcgatacatggacggacaaggcggcaagataagtgggtttggctagcgcatcagcgatgctaatacaaacgatagcaaaaacaagcacaggtatggtcgtggcgatacccgcagtgagaaatccagtacaaagaagggcgaagatgaggataattagctttcgctccgaaaaatattggctcacccaacctaacagaaatagctgaacgaaaatattaataaccccgtccgccattaacagatagcttaacgcttttggcccaaagggaagcccattccagatgaaggtgtcagaaagaaaaacaggtaattgtgaagagtacatgccataggcgaagaaatgacaaagcattacgatgattaagacgcgaaggacaggcatctttaaaatagcgcgggcagagaacgccgctattttatctgtggtacgtgatgttgtggaagggtcttttaacccccaaatcgcgaccagggcagacccaaggacaagtataaaggcggcgtagatcggcgcgctcagactgatacgcgataaccacccggaaacgcctgccccgacaataccgcctaaaccaatgcagcctgtgaggataccgattgcctgacgccgatttctgacgtgcgtacaatcggcaatataggctgcggcggctgacaaattcccggcgctaatgccaaaaagcgtgcgggcgagcaggataaacaggatacattgcgcgttggcgagtaatagtaaacttatcgccgcaatagccagcgtgacaatcagtattcgcttgcggccaacgcgatcggaaaggtggccaatcaggggcgccgcacaaaattggctaaaagcttcagtggcgatgatgattccaatgataagcggcgaaccgcccatctcgcggatataaaaaggcagtaccgacattacagccgcggtactggcggcgtaaaggccgacaagcaggaaaacaggcaaaatacgccgcttgttgagcggggtgatagtttcgctgtcggtgttctcatagacattagtattcatctttaatccctatggcaaaacgagagagataattttcaatatcgttgctctgtttgccgtgaaagaatgcgccgacatagccatcgggtcggatcagcacgcattgacccggcgccagatgataggattcccggaagtgccccagggtatcgatgagctcgtcctgctcgccaatgtgatgaatacgcagtcctcgccgcgcatcgatgaccttaccatgggtttcgtaggccaacagattccagtccggaccttgtagtaactgaaataatcgtaatgattggccgccggcgcccaaaagaggagcatccggagctctttctcccgcttgtaacccatgctgacgttcgggtaacgtgtgggctaagggggagttggtatactggatgtcaagttgttgaacatcgcgttctcgtttgatgcctctctgtttttgagagtcaagtaatcgggtagaaaggtggagcagtgattcggctatcgggcggcgttcctgttcatagctatcgagaagttcttctcctgcgccccgcagcgaggctgccattttccatcccaggttataggcatcctggatgctggtatttaacccttgcccacccgtcggcggatgcacatgagcggcatcaccggctaaaaataccttacccacacggtaatgttccgctatgcgcgcattcatctggtacttcgatacccagggaatcgaatggatgcgaacatccgtccgcccgattcgttcagtaagaaaagccgtgagcacgtcggctgagaaattctgcgagtcgtccggggccaacaacgcctggatttgaaagagctgcgtgccggcgagagggcaaatcgttatcatccgcgccatatcgccatcgttaaaatggtgccatacatcccggttcagaccggaaagtgaagcgtcagccacaagcgcatggattcccaacgtacgaccggggaagctgacgcctaatttttttctgacaaagcttccgccgccatccgcacctatcaaataatgcgcgatgatgacctcttctccagccggcccggcaacatacgcggtgactgtgcgtggggtttgcgcaaaatgtcgtaactcgcagccgaactccacccgatgtccccatgcttttaattgctctcgcataatcgtttctgtcacgttctgtggaaccatcaatggcagatggtagggttcggcgtgggtcggttttgtatgatgcgcaatatctgaatctacatagcttccgtcgtgacggtaggttcgtagtcggggatagagcccgccggcggcgaccactttattgagtattccaagatcctcgaagatttcttgcgttcgcggctgaatacctttaccgcgggagccgataaaaggcgtcgttcttttctcaatcaggcgaaatgagaccccgtgacgcgccagttcgatggctaaagtaagcccggtaacgccagcgccgcagatcagtacatctgtagtggtgtatcttgtcatcgtctctccgatatgtgtattatgcacataagaggagacatgctatgtcagaaaataaaaatgtgcaagatacacatatttccgagcaaatgaaggcgcttcacggtgcgttgattcgcgtggtgagcgcgcttaaccggcctcgtaatgatgagaaattaattgcagaggcggggatacaactcgatcgtgcgctattttcgatccttattagtatcgaacgtttagggccgattggcgttgttgagttagccgaacgtgccggtcgtgattatacgacggtaagccgacaggtcgccaaactggagaagctggggttgataatacggcagcataatgccatcgatcgtcgtatacgcgaggccgttatctcccgtacaggaaaggcgatgacggagcgtatagacgctgcgcgagagcaaatgggcaacgttgtttttaaagactggcctcaggatgaacttgatgtctttgttcggctaatgcaaaagtttgccgatgcaatggatagcgatgcttcaatgccggaataagcaaaagaaaagggcggtcaaatccgatcgtccaggctaatatcggtatctgacattgattaaatagccagcaaagtaaatataacaacaacatttatcgagttaattttcaccctttgaaaggccaacgtatactgcagaatacggctatataacaatcgccgtatcaatggtttttcaaagggtaaatatatgcttaccgaaaaatatgattttcgcattaccgatcagatgactatcccactcagacctcattggatagccaatgattcatacagggaaaagtgtaaaatgcttgtcctcaaccggagtaaaggggaaattcataaggtagactttagtaaattaacagattatatcaaagaaggtgatgtaatctgttttaacgacagtactataataaaccatatgtttatctgtaaaacaagacagaataggttaattaaaattgttttagagggatttttaccaaataatagagtaattatttccggacttttaaaagaaaggcttaacgcgaatgatgttttctatttggttgataaccctgaaatttccattaagatagagcaaaggtttagcgaggagagccagtaccgggccgtcgtggaaaatcatgaggccttaatttgctatttagccagtcatggtgagcgtcttgatgagtatgtggactccagcttgttttataaatatccagatgcttaccgttccgttttttctaaaaaatatggttctttggaaataccttctgccggcattcattttacctgggatcttatccaaagaatcaaagataaaggtgggttaatatccttcatcactttacatgttgcatcaacagaaatgttgtccaacagaaaaatacaaacaaaatgtgtagaggaagtgactatcaacgaagaatactacgaggttccacaagctacagcggatatcattaatactgcgaagcaaaatggcggacgtatttttgccgtaggaactaccgttacacgatgtctggaatctgcgtattcgagggaacacaattgcctcaaagcaagttctggctggactgcgctttatatacatccaggctatcaactgaaagtggttgactgcctgctaacgaacttacatcagccaaaaacgacgcatatggtgttaactggtcagtttgctggggttgatctactcattaaggcctatacctcagaacatatccagtcatgtcagttcgatatgtttggtgattgcatgttaatcatacaagatgaagggcagggatgaataaaataaaaccggtacatataatgctaccggttttaccgagaataagcatcaggggattcgggcaataacctttatttcgaaatcaaagccggccagccaggtaacgccaacagcggtccagttaggataagggggatgggcaaatatctcctgtttcaccgccatcacgtcgttaagttgttgctctggatcggtatggaaggtggtgacatccactatgtcatcgaatgtgcatcctgctgcagtcagtgttgctttcaggttttcaaaagcaagcctcacttgtttttgaaaatcaggctccggcgttccgtctgtgtgactgcctacctggcctgaaacaaacagtaaatcaccagaacggatggctgcggaatacccatgttcctcatacagagaatggcggtcagcaggaaaaaccgcgatacgttgcgtcataatgttatcctcagatagcgtaaacacttcgggcgggaataaaatgaatgtcacatacacaacgtaggccatagtttcatatacgtggcatatgtcaaggtgccgtcacataaaagaactgagcctgtttgtcgtatcgtttgacgggaaagagagcattttctgagtgattagcttctgtgtcgtgtcattttgtagacggcatcattttcacgctttccaacaccaatgacagttaccgtgataatttcatcttcgacgctgtacaccagcctgtatcctgcaccacgcagcttaattttgtactgatcctttcttccatgtaattgagaagccggaacccgagggttttcaagccgttcccttagcttttttttaaactgttcctgtatggtatgacccagttttttccactcttttagtgctgattcgttaaatgccagcttataagtcatcaatgttgacctcaatgacgcgttcattcgcacgctcatcgataatacgaccgagttcttcatcctcaagaatatccataagatgagcataaagtgccggaggcacacagtagaaagccggttcattgcggttaagaatggcaactggagcgccatctccggcattgaaagttcccattggatcacgtttcagttctgtaatgcttgctgcagtagtcgttaaaatttgaaatgccataatttacctcctggttgatgactaaatatagcacctttaatagtactaataaaagcatccttcacgaaggggattcagctccagcccggtcagtgatgcgggcagctgacggttttttcaaggctaatttcagatgtccagaacctaacttatgaccactgaaaccggcgtcaataactcgccaacccttatcaagcgtgatgtaacaaccgaagtcagccttgcagatggtgatattattttacttggtggccttgctgaacagtcggatggattattctggcctctgacgtgtcgcagattgcagatcgtacagtcagggattacaaccgtattgccagaggaagcgataaaatatggtaagtgatactcttgaacagcggatttatgaactggtaagaagccatgatggaatttacctttttaagaaaaaagaactgacaccgtcaacagatttggattcagatctacagctggaagatgatgaagtactggcattgatggatgatttttttacgacattcaatgtagataaagggaatttctcgatcacaacatactatccgccagaaccaccgctaaaacatttgcttaatccgtttcgcaaaaacgatattcctcaggtgccggatttcacgataggtatgctcattgcgtctgccagggctggttgctggttgtatgactgattcacgctgggggctgctttccgccctccgtcattattgtcaaggctatatgccctaacaagttataggctctataaagatatatattgaacgctaaaataatggactattaggtgacaccatgcccacttataaacaagttgtgaaccatgttaagaaacatgtattgtggaaagatgagtattttgaacgctattatcggctcaatcctgaactggttcagaagcgtttggataaaatttatcaagctgaagatgatctaatggtgcttatcagtactcaattattttgtttcttgcaggctaatggcacgctctattttgatggttgctataaaacagggaaagcagataactcattgctttgtactaatcttgctctatggagtatcgagctagcttgtgatcattttgatattcgggaagagcggggacataccacgaagtttagcgagcagggagagagttggttaacactattcgcctgcaatcaattctctttagttccttattgctatccggccattcagcgcgggtttcaaagcggcgtattgaaagaaattgttccgttttatcgtgaacagaaattgggtatcctggcgatggagataatggcgcgtgaacggggggatacaatcaactgggaagcaatgcaagtgcgtgttgatcctgtctatctggacttttgccaaaacattttattgtcatcagatgatgaactagtccgcaccggattaattacgctatgtgataagcatcttgagtggaccgattttcataatagcgataagcattgttgcttgactggctatgaaattcagcgtcaggatctattactctggccatttgaatatcaggcggtaaaaaactggcgagcacgtcaagggttaagtacaccaatgattgaacatccattgatgaatagcccgatgacgacagcgaattgtcctgacttttcgcagtggcagcgtccagagtggttcaatccgttagttgattttttggcgcagcgcaggcctgagctggcatttttacgacatctctttatttaagtgagcgattattgtccagttttctctgggcctggcgcgcaactccaagcacatgacccagtcttttattatcaacaattgcgacggggtccacctccgacaaccggtcgaaggtggaataggggagcagaacgccattcagccgcagttccttatgcccgtcaggataatgccagacttcgatatatttaccgatggcccggcgactgtgctcgctgtcctcaatctgtggattcagatttcacaaacagcaggtgcatcaggcgactggtggcatagtcaacatagaccaaagcagtacagggtcgaccccagctttcaaaccagtggtggtcgcagccatcaatttgtatcagctcgccagtacaaggccgcctgtaacgaggctgatgaattttcggcgcgcgttatctgcgagggatccagattccggcttttatcatgaggcgtcggatagtttccttgccaagaaccagaccgtgaacttcctccagattttccagcgccagcgtggggccaaaatcacggtagtgctcccggattatacagagtgcctgatctatcagtgaagttggcaacagatggttaccaacgcggccacgactatggttgttcatgccaagtggtccgagttggcgataacgtttcagcagccgtctgcaatggcgtggcgtaatgccgagcatctcagcagcctgaccgggatgtaaattgcggtcgatggcatcctgaaggattttgaggcggttgattcctttcacggtgaacatcccggcgtcatgtctgagaactatagtctggacaatatgagccacaaatagacattagcattgagcctctacaagattggtgcgcataatgtatattatgttaaattcaccagaacatttaaaagacatgttaaagcggctggattcgtgtatgtcaaaaaacttctggcccataagtttgatcccttccctgccgtgacgctgcgcgaattctgttgatttgcacccgcttatcctgcacacgatttcacgcagcacacgccacgcaggcataaaaaaaccggccactgtgaccggttcgtcgcgcaggtttttggctcagtgggttttaccctggtccgctgctttttctgactgatgttctgcagctctgacaacggctataaacgctttgatacccggatccacatccggcgacaacatgcgcattgttgatttggcattcctgccgaacctcgtcaaaaatcgcaggataaccgaacgtgactttaatcagcgtgcgcagcatccctttggccacttccatttcacccgccataattcgccggcgtccaggtcgttatgatactgacaatacactggaaaatctgacggtcaaagcagcaaccggggaaaaacagtggccagttagcacagcgtttgcatgaactggtggatagttcggggaatcagcggaagaccccctattctcaaccatctcctcataggctttcctgaacaatgtgattgtttgagtaactttacgacaattgcttcaaaaactatcaaatgccagacttccgctaccagacggtatacacagtattactatttctttttatatgccccatacaaaagcgatacgggtgttttttctaatatctggatttcatttttatgtgctttatgttcactaaaaatatctgccagacttttacctccaaaggccaggccaattcccgttgctgctgctgaaagtaatgtcaattgcggcatggcaagtgaagctatacctaacgtggctgttcctgcaaaaattaatccagatgagatcttttttttctttgaattcttaatggctgattcatgcgactttccatactcttcgaccacattgattaaatgttttgaaaaattatttgccgcatcttgcatttgatctggtgtttttccttgcaagtcatgccttgagattcttagttcatgccttaaggattccagttgacctctttctctaatcttttttaattccagatcggaaagcgcagtaaggaattttacttccgcggctgaaaggcccattgtaatcgcttgctcttcagaagaaagaggatttaatttaccataatccttgaccaactgctccgtagtccattcatgtaaaaacatatggttactataaataaccggatcaatgcctaatagtgttgccgataattgagttgatcgttgtgcataaattgcaccttcaaccttacccagtaaggttgctatagctgacggcagatcgtaatccagaagatctacctctcttgttgtaaaactctttaaatctgtatcgtaaacccagacttctttttcgatgttattgaaattattaagcaatgtttttaataattctttatttgttaggatcttctggaatgtttcttcgtttctcccaaagtgctcaagaaacgctaaataagtagcgtaatccatttttctatctttaaaaaagagctggcttagaaaagcggcagattgttcatgattgcgttctttatcaaaatccagtaattcaggaacgattagaaaaattggataatcatcatcaatagtcataaacgggatggcgcgaaatagattagaaacatgttcaagtaataccaacctgcgcatgcggacataactattatctggtggcaatgacaaaaatgaatgcagagagctaagagaaggaaaatgtaatggatcaaccattatgatgctatcaaaataaatccccagagatctaaggtgattagatatgttataaccaaagcgttgaatcggaagtaataatcgataacttttagacgcccgcacttctgttataagcgccgcggcgtgagtatcccaaaatttatttagcaacacgattaggtttgtaagttgattatctaactcgggagagctaattagctctttcaggatgaatctacgtaattcttttagttctaaatttctgaatgcatatttatatttttcagaaaaagcgttttccatcaataaaacatattcattctgtatgctttttgtaatactactcatcatctatctccggaaccaccacgcaacgatttcccagtgtagtggttcttatcatgtgtatattgttagtcatgttatcgtagaaaattcagtggtcaataactcattgaggtagctactaaaatttgcagttaccaggatttaggatgattttaaaaatgtttataaattcaggctgcgccgcagtgattgcactgatttccacgtaacatgataatcaatggctttgataccctttaaacgaacaaatatgagcttaacatggcgacaataaaggatgttgcatccatggccggtgtatcaaccgcgactgtatcacgcgtcattaaccagaccgcgtgggttgaacccgtcacgcgcgaacgtgtagagaaagccatgcgcgatctcaattatcgccggaatgccgccgctatcgcgctggcgaaacgcagcggcgatatgctcggattgttaaccggcaatctggctgatcctttttttgcccgccttgctcgcggcgtagaagatgtttctcgtaagcagcagtatcgcttgatggtatgtagcggcggccacgacgaagaaatggaaaaagcgggactggattttctggttaatcaaggttgtgaggctattgttgtacacgccagccgattaccggataaagagctgctgcgctacgcagcccactttccagcgctggttgttgtgaatcgttatatagccggtatggccaaccggtgtatctggctggaaaatcgcagcgccgccagggaagcgacccgatatctcctggcgaacgggcatcggcgcattgcctgtgtgacatctgacttgccaattattgatcgtcaggaacgccttgatggttaccgtgaggcgctggaagaatatggtatttctccagaccctcgctgggtgattagcgttccgtttaacgaagaaggcggcgagcgggccgcgcatcaacttattaatagcgggcttccccttacggcagcggtcacgtttaacgatgtgatggccgctggcattatgcgtattcttcatcaacgcggcgttcagcttccgcaacagctctctattgtcggctttgatgatgtggtgctggcccggtatctttatccggcgttaacaacaatgcattatccggtcgaacaaatggcgcgttgtgccgcgcaactggcgatacagttataccagggcattacgccgccgcccagcagcaatcatttcaatgccgaactggtgatccgcgattctgtcgcgccctatttttcacggtgaatgcgtcgtcaacagtaaaaactgtgatggctatcaaattaacccttctcatgtaatcggttacatggacgaaagtaatggatcacagtagtgggaagcgtatccccctacccttgagctaccttactgaccggagctccattatgagtgcatcacaaaacaagaagaaaacgctgtcattgggtttagcgctaatcccagtcatctccatgttgttattgttgattatcggttacggcattatggggctacgtatcgaaccgctccttctgtgctctgcggcggtagcggcaggcattgcatggtggcaaggatactgttgggaagacatcatcaactcagtggtggataagctggctaaagcaatgccggttatcatgatcctgatctgcgtgggcggtttgattggctcctggatgtttagtggcaccattccctacatggtgtactgggggctaaaactcataagcccggaatatattttgattgcagccttctttttaaccagcgtggtctccgtctgtaccggtacatcgtggggatccgccgggacggttggcgttgcgttaatgggggttgccgccgggctggacgtgtctcttgcagcagcagctggcgccgttgtttctggcgcttatttcggcgacaaaatctcaccgttgtccgactcgactaactttgccgcgattgtcgcagacactactctgtttgagcatattcagcatttactttggacgaccctgccaagtttcctgcttgccgccgtggtttatcttatcgccggacacagtaatatgctgggcgaggtggctacgccgcagcgcgttacggacatcatccactcgctggagtcgctataccattttaatattgttcttattttgccgccggtgatcgtactgtggggcgcaattcgcaaaaagcctgtcatcccattaatgttaagcgcctgcgtacttgccttgttcctcggcgtcatcatgcagggactgagcatcaaacagggactggacgctttcattgatggatttgatatcgccatgttcccacaaggcgcagaaggtgtcgtggccgatgttccgcgcctgctaaaccggggcggaatgttctcgatgatgggaacaatactgttagttttctgcgctttttcatttgccggagcgctaacgttaaccggcgcgttaacaatcatcattaaccgactgctgaccattattcatagcgttggtcaactcattgccgccactatcggcaccacaattttggtcacaggagcgaccagcgacggtaaactggcattgttagttcccgccgaactgtttaaagatgcctatcgtcgtatggggctggatactaaaaacctttcacggacgatagaagatgccggtaccgttatcgaacctctcctgccgtggacctcggctggcgtctacatggcaaccacgctgggcgttagcacgcttgatcttctgccctgggctatccaatgctatgcggcaatcttcttcgcattaatttatggttttagcggaattggtattgccagaactgcctccgcctcagaaaagtcgccgcaatcgtcagtgacggaataataaggaaacaagatggattttaaccagattatcaatcgcaacaatactggttcggtaaagtgggattttattgagcgtcactttggcgatggcgcagggaaactgctgccgatgtgggtttctgatttcgattttgcctgcccgcctgaggttcaggcggcattgcatcagcgaatcgagcacggcgtatttggctatagcgaacgcgatgaggcctattttaacgccctgcttcactggttttcatcacgccaccagctcacgttaaaacaagaatgggtatgcagcgtggaaggcgtcgtaccagggttggcgctcttagtgcaaatgttgacgcatccaggcgacggcgtagtggtacaggggccatactatggctccttcgccaaaataatcacgcttaatggtagaaaactgctggagaatccccttagcgagtcgccggacgatggctaccagatggatttttgccaactggaaaggctgtttcgccatgagcgccctccgctgatgattttgtgtaatccacataatccaaccgggcgttgctggtcggccaacgagctggagcaactgcttttattatgtgaagcttatgatgtcactctcatctcggatgaaatatgggccgatctattgctgcccggcgaaacctttacctcggtactgcatttaggggtgcgctggcataaacgggtcatctccgccactgcggccagcaaaacgtttggcttatcgtcgttgcgaatttctaattttctcattcccgatcctacgcttcgccagcgtttcctgtctcgtctggacgctcatgggctggatgtctttaacgccctctccgttcaggcggcgactaccgcatggaatgaaagcagacagtggctggattcgctactggattacctggcggaaaaccgccgctggtttgttgaacatgcgacagagcaccttccctgggcaagaattgtcccggcgcagggaacctatttattatggatggattgtaaaaaactgggactggatgacgaacagctaaaatgggtaatggcggatgtcgcgggtattgctccttcaatgggcagcggctttggcccggcgggcagcggatttatccgtttaaatctgggatgtccacgtacctaccttgaaatggcaatagacggcctgaagcgaatatcggtgaagacaatcaaaggaataccaacaggcggatgaatttttcgggcggtaaactgacaacggtgttatttctgcggcatgatatcgcctgagcgccagtaaaaaaccggccatcaaggccggttgggtccggagcgcggttttactatcaggggcgtctgaataacacgatactgcgcccggccagatcgaaatccatttcttcggtaatccgcattccctgctgcgcgttatcggcagtcgtcagttcaagtacccagccgccttctccccacatcggaatacggaacggtacgctgccttcaaacggattgaaaagcagtaaggcgtcatgccagatccccgcttccggctgaagatcgggacgactaatacatacgcctatggtcgatccctcatcccattgttcggattgctgcgcccctccgccggcgttaaaccagcggatctccagaccgtcacgccagctctcccggcgcagcaacggttgcgtggcgcgcagttgaatcagatgacgggtaaactcccgtagcgcattggcggtttccggcaaattatcccagtggacccacgatatttcactgtcctgacagtagccattgttattgcccatctgactgcggccaaactcatcgcccgctaataacatcggcgtgccgtgcgagaaaagcaaggtggtcaggaaattacgtttctgtcgctcgcgtatcgcattgatgccctcgtcgtcggttggcccttctgcgccatagttacaggagcggttatcattatgcccgtcattattatcttcgccattggcttcattatgtttgtcgttataagacaccagatcgttcagcgtgaagccgtcatgggcagtaataaagttaacgcttgaccaggggcgacggccgcgcaaatcatagagatcgccggaacccagcaggcgtgcggcgaaatcatttgtgacgttgtcacctttccagtattcgcgtaccgtatcgcggtatttatcattccattcgccccaccctggtggaaagccgccaacctgatagccgcccggtccgatatcccagggttcgccaatcagtttcagttttgccagcaccgggtcttgcgttaccgcatcaaaaaaaccgcctctctgatcaaagccttccggctcacgaccaagaatggtgcccaaatcaaaacgaaagccgtcgacatgcattgactccgcccaatagcgaagggaatccatcaccatttgcagtacccgtggatgagaggtattgacggtattacctgtccctgtatcgttaatgtaatagcgatgctgatcgggcatcgtgcgatagtaagagaagttatcgatacctttaaatgacagcgtggggccaagttcattcccttctgccgtatggttatagaccacatccagtatcacttcgatgccggcatcatggaaagcgcgcaccatatcgcggaatccctgaataccttttggaccatagtagcgcgtcgccggcgcaaaaaagcccagcgagttgtatccccagaaatttttcagtcctttatcgagcagatgctgatcgtccgggaaccagtgaacgggtaaaagctcgacggaggtaatccccagacttttaatgtaatccacgctggctttatgccccatgccttcaaacgtaccgcgtagaggctcagggatcgcggaattaagctgggtaaagccttttacatgcgtttcataaataatggcgttcgaccacggtatggaaggccgttgtctatcctcccagttagcctcatccggatcaatcacccggcatttaggcgtaaatggcgcgctatcctggtcatcaaaggtcaaatctttatcgtcatgaagtaattgatacgcgaaatgcgcatcgttccactgaatatcgcccaccagctcacgggcataagggtcaataagcagcttgttggggttaaaacgatgaccattttccgggtcataaggaccgtaaacgcggtacccatacagcgcgccgggctgcaacttcgggacatagccgtgccatatttcgtcagtatattccggtaactccagacgagcgatttcatgctccccgctcggatcgtaaaggcaaagctcgacgcgttccgcatgggcggaaaaaatagcgaaattcacgccttcgccgtcataatttgcgccaagcgtatggctgtatcctgatctgatttcaaaagccctgtttgttgtcattctctttctccacccacggtaaacgttgtcctgtcacggcacatcaacacataaactcagtcgctcattaaaaccagtacgccgccctggtgtgaggccaacgacaggcgttcaccaggcattaacctctcctgggtaagcacattgcgataacgatgctgattaagctgtccgggtataataatgtcggttcctgaccagaaaccgctatgcgattgtgacaataagccgtcacattcggcgaacaccagtcggggcgcaacaacaatcagcgcatcatcatgattgactctggcgtaagcgatgaccttgtcggcacgctgaccaacagcccgcagcggtatatagtcgccaaaacggaagagctcatgattctgctgacgcagacgcagtaatgcggcggtgacatactgattcacctgcccgttcagccaactctcttcgcgcgagaaaactcccggcgtcagttggtctaactgctgcgccagcgtggcgaaatccggttcgcggcggttgtcgggatcgacaagactaaaattcaacgcctcgcttccctgatagatatcaggtactcccggcgcggttaatttgataacggtctgcgtcaggctgttaaccagtcctgcgcggatgaagggttgcaaggaacgataaaaatcctgcaaaaatgtctgattatccggcgccagtaaataacgggcgtaatcaagcattgccgtttcgtaagcctcattactgtccacccaatcggtacgcagcttcgcttcgcgtagcgctttctccacaaaggcttcaaagcgtgttttcagcgcgtttaggcctgtttcatcctgtggttgtagcaccgggggccagacgccggtcagcgcctgatataacatccacgtatccgccgattttggcgcagtgccatcattcaaaaatttgacatgggtctggttcatctgccgccagcgggcaaggcattcgctccactgctccggcgcttcggtaagcgtatacaggcgtgctcgcgcatcctcgcctcgcttggtatcgtgggtcgacgtaccggataacgcatcaggctgtcgcgcctgtcgggttttcatctcatggtgaaagcgttcgatggagaagtgatgcgtgacgggctcggcgccgacttcatttaacgccagtcccatgttttgacgaaagaaaagcgtatcctctaccgatttcgccatcagcggaccggtgagttgctggaaccgaacgcgaaactgtgtcgcctcctcctggctggaggcgggaacatcgccggtaagaagacggctcagaaatgtaagcgcttctggctgcggaggggtttcaagcgtctttacccgttccacaatacggtgtaacaggcaaatatcggtcggtggtagcccttctgccgtgccgtaagtgcgatatacgggaaaggcaattaataactcgcgtaacgcctgccgaacgacgctctcttcctgtgcgatctgtagctcgctggcaatcgacagcgcaagcgcgagcagccgggtaaattccccctcgaaattgcgatcgaccatcagcaatttagccgcccgtaattccgcccgcatatccactggcgcgccttttacggtctcgtaagcctggcgcagattgtctatctgctcatcgtcaaccagcacctccgccagcgaggcgataaattcatagcctgtggtgccggaaaccggccagtcatcaggaagttgctcgcctttagcgagaattttttccacggtgatatagcacgccggccccacttcctgacgtaaacgcgcaagataggctttcggatcggcaaggccgtcgatatgatcgatacgtaaaccgtcaaccgcccccgttctgaccagctccagaatcagccgatgtgtatcgtcgaagacggttttatcttccacccgcattcctaccagccctgtgacctcaaagaaacgccgatatgaaagcgagcgagcggcatcgcgccaggacattaatttccacggctggcgctcatgcaaatcagcaatagcggctttatcggtaagcgccagtatttcagcctcgcgcccctgccacgtcgccggcgcaagcggataatagttatcataataggcgaacgcgggtttacccgtagcgggatcgggcttgatcgcaatttctccgttttccagcacggcgtcaaacgtgtcgcctaaaaaaggcagcgtcagtcggcgcgaccagtcaatatcgaaatggcgcgcgtaacggctctccttgccatattcaagcacgtcgcgccaccaggcgttttccagcgagctggccatgtgattaggcacaatatcgatgatcaatcccagaccttgcgctttaagttcagccaccagtctttcaaatccttcgcgcccgccaatagaaggctcaatctcattcgcatcggtgacatcataaccatgcgttgacgctttggtggcggtaaagatgggtgaggcataaagatggctgatacccagatttttaaggtaaggcaccagcgccgcagcgcgatcgaaggtcatgccattgcgaaactgaaggcgatacgttgcagttgggatcatgatgcagactctccctgggctaagcggacaataagagaatgttgggaaagcgacccggtggattcattcggccaggcgaagagagtcttacccggtaaatcgggcagcaataccgtcgtggcgctaatattcagcgccagtgacagcgttcctcccggaaaacgccagctaacggcaataaacccgggcgcggtttgcaataccgttcctgagctctcacgggcagcggacaacagcggcacgatatgcttctggcgcaaaagcagtagttcgcgggtaaacgccagccacgctttaccctcttcactgtgctgttgcttccagttaagttttgagcgttgaaaggtctctggcgcattcgggtccggaacattttcccctgcatgatcggcaaactcttttgcgcgaccttcacgaacggcgcgggctaaatccccatggaaatcggtaaaaaaaagaaaaggacggctttcgccatactcttcgcccataaaaagcagcggaatatgcggtgaaagcagcaacgtggcgagcaatacttttgttcgttcagcacccgccagggttatcagtctgtcgccctgggcgcggttaccgacctgatcgtgattctgaataaaatccacaaaagcgaccgggggttgtccggtactttttacgccgcgaggttcgccggtttgcggtgaaatttctccctgataagcgaatccttcggccagcgctcttgcgaggtgtttttccggggcatcagcaaaatcgttgtagtaggcctgggtctctccggtcgcaaaaacgtggacggcattatgaaaatcgtcattccattcggcggtaaacagcggcgcattgccatcctgatctcggggatgcagagaaataatattgcggctatcttcggtggtcagatgaatgggcctgtcggtaatgtcttcccgaatacgttgtgcgatttcaaccagcacatgcctggcgctactgtcctcaatctgatcgatagcgtcaaagcgtaagccgtcgagatggtattctgtcagccagtataacggcgcctcgatgatatagcgccgcacggcgtcgacatcataggcgataccatttccccacggcgtcatgcgctctttgtggaaaaacgccggcgccaatagcggtaaataatttccttccgggccgaaatggttcagcacaatatccaggacgacggaaagaccatacccatgcgcggcgtcaataaacgccttgaaatcatccggcgtcccataggcagaatgcggcgcgtaaagcagtacgccgtcatagccccagccacgctcgccgccaaattgcgcaacgggcatcacttcaataacggtaacgccgagttcagcgagataaggcagcttcgctattgcggcgcggaaggtgccttccggagtgaacgtgcctgtatgcatctcatacaccacggcctgctcccaacggctacctttccacccggtgttgcgccacgtgtagctgcctggatcaaccacatatgacggaccgttgacgtcagttttttgggcgcgggaagccggatcggggaccaccatgccatcgctgagtacaaagttatactccgtacctggcgtcaccccggcgacgtccagcgtaaaccagccgtcaccgttcgcctgcatttcctgatctttacccgcaagcctgagcataaccttttgctgaccggtggcccaaagacgaaagcggacaacatcagcggcgatatattcagccccccagcttttgcaaaaaatttttgaactcatttgtcgctccgtttaacccataacctctacaacatccgaagaacaagcatagactatggggctaatctttacgtgacgctgtcacttaacaggcattctttttcgtatctgcgtgtaaaaccgtggaattattgtcgggattgctcagatgtaccgaagtgcgcggtatcgcctcgcccgtgttcgccagagccctgaacacgctgtagctggataacctctccctgctcccaggcgttagcccccttaacaacgggatgttcaggcagatcctgccgctcgcgtttaatggcttgggtatcaattcccagacggcgatcccgatcggccagcagcgcggggtcaagctgcccgtcgccagtaaagcccatcatcagcgcagggatacccattggcagggttttatcccggtcggtatgccaggtgtgccaggtcttgccataagtattaacaatcttactcatcaacgctttatcagcgacctgcggtaagccaggcgccaccaggctaccggatttcacctcgtactggtggctgtgccacagttttttctcctcgggaggaagcgttttaaataaacgttcgctgataatgtactccacccccatcaggcgcgcgtttttcgtattgccgtcgtaaatcaccgcctgcatgacatcttcgttcaggacggtaacgtaatggtgcgcttccatctgtccgtttttatcaccgctataaaaatggaacccgtcaaggtaggtactgatggcatcgacaggtggtctggattgaatagccgccgcgcctgtttccagggtacgtaatttggcagaggttttttccccgggaataggtgtttgcggcggcgtattattggcgccgcatccggccagaaaaggaatgataaagagtgccagcggtaaaattttcattaggtctccatatagtgaaagggctctaatgaaaatagtgcaataccacgtgattggtagaagaaatggaagatgttatttgtgacggtgtcacaaatagtaaaacccgacacacaggccgggttttgatatcagtttactcttattttgagagttctttcttgatttcgtcttttattttgcttaattcactctgcgggtttttcttacaaagctcaacggctagcggcactgctgtcgtctcagtttcctggaaatctacgtagtccccgcctttaaaatcttcatcttcattcagcacccagaaagcgactggcgccatcgtctgcggattgaggtcaacaaactcctggcagctcatacctttaggcgtaacgtttgttttagtagtatctgttgccgcattcacgctaacactggttaccagcgctgccacgataatacctgctgtagcaagggagaatttattcattgttgttgctccaataattatataaataacctctacatctgcgcgttaacccgttaatgtagaacacagaaaataatacccctcctctctcaggaataaagatcaccctccgtgatatggctattattgatatttacgttgactgattttgatgtttgatgaataaagcaacatggcgagcagattttaaggcgaaaaagtaggccacgacaatagccgcagacgtggtctacggcgcgttgaggtgatagaaatacggcaggatctcagatagaccgggagcgagccctccgtctgaaagtatattcatcagcccgatcaacccatcgttaccgggctggagaggttatcaggcgttaagctggtagtcgagggtgatttccgcattcagaacctgcgataccgggcacccggcttttgctttctggatgatttgatcgaaagttgaagcatcaatatctgctaccgcgactttgctttgtagcgcaattttggtaatggcgaagcccgcctccaccttatcaagcgatacgtcagcggtggtgtcaatggatgtcggcgtaaatccagcctctcccagcatgagtgatagcgccatggagaaacaggccgcatgtgcggcgccaattaactcttccgggttggttccctgcgcgccttcgaaccgggtattgaatccatacggttgttgattaagcacgccgctttctgttgatacagtacctttaccccgtttgatgtcgccttcccagtgtgcctgacctttcttatggattgtcatttttgctctcctgttggctcaaaaaataaagtatagaccatgctgctaatctgcgttgtccatgccgatggaggtagcatgttgtcgattacccgcacttcagatatagaaaatagttgtatgttttttcagtgatgaatattaaaccaacagggctccctttctttaaagaatatatccctccttttgtccttactttttcttctggaggcgtattccattatgtatattttatatgtatattgagatttatcctatcccattgtaataaaggataaaaatcacaataagtagccttttaaatgtatattaattgaccactatttgtatgaggatatgtaattggcaaacgtaatatattttcttcaggggtaaacaattagagttccgccttgcgttaaaataactccaggactaatcttaaccacagccgcaaaaatatttgccatgctgaatacgaattaattttctgcgagccgtactaaataaatacatgttcacggaggcattatatgtttacttatcactcagcaaatacctcagcagcacaaccggccctggtcaacgcgattgaacaaggattacgcgcggagttaggcgttgtcactgaagatgatattttaatggagctgaccaaatgggttgaggcttccgacaatgacatcctcagtgacatctaccagcagaccatcaactatgtggtaagcgggcagcacccgactctgtaaaacctgctatgctgtatcggcaaccttaggggttacgtttctttcgcgtaagcgaatttgtccttaaaactagcaacaggattgaggagttaacatgaaatcgaaccgtcaggctcgtcatatacttggactggattacagaatttccaaccagcgtaaggttgttactgaaggcgacaccagcagcgtggtgaataacccaaccggcagaaagcgccgcgccgacagccaaaagtaatcgtacagtcctgaaatgacgttaaacaccattgcatctgcaatggtgtttttgtttataggaatgaccttaacgtctcacaatgctttatactcagggtcggttccctggtggaaggcaatatatgatgataaacgacggtgccagggacagttattcgaaaaagagtgagtaacatggaaactacaaccaagaaagcacgttccctttatatcccttacgctggccctgtattgctggaattccccctgttaaacaaaggcagcgcttttagcgtagaagagcgccgcaacttcaatttgtcagggctgctgccagaggtcgtcgagtcgattgaagaacaggccgaacgcgcctggctccagtatcaggggtttaaaacagaaatcgataagcatatttacctgcgtaacatccaggataccaacgaaacgctcttttatcgactggtgcaaaaccatcttgaagagatgatgccggttatctataccccgaccgtgggcgcggcctgtgagcgcttctctgagatttatcgccgggcgcgcggcgtatttatctcttatccgaaccgtcacaatatggacgacattttgcagaatgtgcctaaccacaacattaaagttattgtggtgacggatggcgagcggattctggggcttggcgatcagggcatcggcggaatggggatacctatcggtaagctgtcattatacaccgcctgcggcggcattagtccggcctatacccttcccgttgtgctggatgtcggcaccaacaatcaacagttactcaacgatccgctttacatgggctggcgtcatccgcgcattaccgacgatgagtattatgcgtttgtcgatgagtttattcaggccgttaagcagcgctggccagatatcctgctacagttcgaagatttcgcgcagaaaaacgcaatgccgctgttgacgcgctatcgtgatgagatttgctcctttaacgatgatattcagggcaccgcagccgtgaccgtcggtacgttgatcgccgccagccgcgctgccggcagtcagcttagcgagcagaaaatcgttttcctcggcgcgggttccgccggatgtgggattgctgaacagatcatcgcgcagactcagcgtgaaggtttaagcgaagatgccgctcgacagaacgtttttatggttgatcgcttcggcctgttgacggaccggatgcctaatttattgccgttccaggcaaaactggtgcagaaatgcgacaatctccagcactgggataccgaaaatgacgtgttgtcgctgctggatgtggtgcgtaacgtgaagccggatattctgatcggggtttccggccagaccgggctctttactgaagagatcatccgcgagatgcataagcattgccctcgcccgatcgtcatgccgctctctaatcccacctctcgcgtggaggccacgccacaggacattatcgcctggacggaaggcaacgcgctggtggcaaccggcagcccattctcgccggtcatctggaaagataaggtttatccgatcgcacaatgtaataacgcctatattttccccggcatcggacttggggttatcgcttccggcgcatcgcgcattactgatgaaatgctgatgtcagccagtgagacgctggcgaaacattctccgctggtgaataacggcgaaggattagtgttgccagcgcttaaagacatccaggtcgtgtcgcgcgctatcgcttttgccgtaggtaaaatggcgcagcaacaaggcgtagcggtgaaaacctctgcggaagcgctgcaacaggcgattgacgataacttctggaaaccggaataccgcgactaccgtcggacttccatttaatacgtacccggcggtgaatgccgccggatatcactttcttctttagttttggtgagtctgtcgacacacctgaattcctttccctgcttatttgtcaagctactaatattagccacctttatgtattgaacggggatttatcaggataatcctggctaaactattacattgtatttctgccgccttgcataactcatcagaaatattaatcctaaagaggtaatagcgccttacctgctattacttacctgctatgcagttcactattaataaaaggagaaggttatgaaagctgctgttgtcacacaagatcatcaggttgatgttactgagaaaacgctgcgtccccttcgccacggtgaagctttgctaaaaatggagtgctgcggcgtatgccataccgatctacacgtgaaaaacggcgatttcggtgacaaaaccggcgttattctgggacacgaaggcattggcgtcgtggcggaagtcggtcctggtgtcacctcgctgaaacccggcgatcgcgcgagtgtcgcgtggttttatgaaggatgcggacactgtgagtattgcaatacgggcaatgaaaccttatgccgcaacgtgaaaaatgccggttacacggtagatggcggtatggccgaagagtgtattgtcgtcgcggattatgcggtgaaagtaccggaaggtctggactctgcagcggcaagtagtattacctgcgcgggcgttaccacctataaagcggtgaagatttctcatattaaacctggccagtggattgccatctacggtctgggcggtctgggtaatctggccttgcagtacgcgaaaaacgttttcaatgcgaaagtgattgccattgatgtcaatgatggacaactgaaactggccgaggaaatgggcgcagatctgaccattaattcacgtacggaagatgcggctaaaattgtgcaggaaaaaaccggtggcgcgcacgcagcggtggttaccgcggtcgctaaggcggcgtttaattccgcagtagatgccgttcgcgccggaggccgcgtggtggcagtcgggttgccgccagaagccatgaaccttgatatccctcgcctggtgctggatggcattcaggttgtcggttcgttggtggggacacgccaggatctgaccgaagccttccagtttgcggcggaaggaaaagtcgtgccaaaagtcgctttacgtccgcttgaagatatcaacgttatttttaaagagatggaacagggacaaattcgtggccgtatggtcatcgatttccgtcgttaaacgatttgctgtggtcgtctgagtatacagacagcagatgaaaacaaggcgctaccaggatagcgccttgtttatcagattgcgaaagaattactgaataccttcttcgctctctttttttgcttccgccttctcgatttcacgataccagcgtggatgatgtttcttcgcccagcgacggctgaccttcccttcgatcatgcctttaatcgagcctttcacccaaaatgccatatacatatggatgaggatcgcgtgcattaaaataatgcccgccgccgcatgaatcaacaggctataacgcaccacctgcatggggaaatactgcgcgaaatacggacgccagataatcacgccagtcaccagcagcacaaaaatcatgctcataatggaccagaacatcatcttctgtccggcattgtatttaccgacatccgccaccttatgctcattgcctttcaatacttcgacaatatttttcagccacggaatatcttttttatccgggatgttgtggtggacgaaacgcacgaacataaacatcagcgcgatgaagatggcaataccgaagaacgggtgcaaaatacgtcccatctgcggcgtgccgaaagtttgcgtcaaccattgtagcgtcgggaagaaaaacgaaatccccgacagcgctaccaggaagaagcagatcaccaccgtccagtgacaggcgcggtcgacaaatttcgtgcgcacaatcattttcgacttactcatgatgatcctcctcatcgtcgtccgtttctttattcgggccaataccgatgtagtggtaaatcagaccggcgaaagtggcgataaagcccgctgcggccagcggttttagcgcccctttccacagattgattgaggtatcgatctgcggatctttcggcaagccgtggtacaactccggctgattggcatggtgcagcacatacatgacgtgcgtaccgccgacgccctgcgggttgtagataccggcatgttcaaagccgcgcgcttttaacttctccacgcgttgctcacccagttccagcatctcttttttggtgccgaagtgaatagccccggtcggacaagttttgacgcaggccggttcctggcccacgctgacgcgatcgacgcagagcgtacatttataaacgcggttgtcctctttgttgaggcgcggaatattaaacggacacccggcgatacagtaaccacagccgatacagtgttcagattgaaaatcaacaatcccgttcgcgtactggatgatagccccggcagatggacaggctttaagacagcctggatcttcacagtgcatacaaccatctttacgaatcagccactccagcttgccgttctgctcggtttcggtaaagcgcatcaccgtccaggacttggcgctgagatcggcagggttatcgtacaccccgacacaatgaccaacgttatcgcgaatatcgttccattcagaacaggctacctggcaggctttacagccgacacaggaggagacgtcgatcagtttcgcgacttcggctttgtaatcacgcgcctgcggaggcggcgtgatggcgtttgttgcggaccgtttaataatgtcctgcgtttccatagacatatgttcgcctcccttacgccttctcgatgttaactaaaaacgctttgtattccggcgtttgcgagttggcatcaccgacatttggcgtcagagtattggcgatatagcctttgcgcgcgacaccctcaaagccccagtgaatcgggatccccaccgtttcaacctgctgaccgttgacatgcagggtgcgaagacgacgagttaccaccgcgaccgcgcgaataaacccgcgtttactgctcaccttcacatagtcgccgttagcgatacctttcgctgccgccagcgtctcactgatctccacaaactgttccggctgagcgatagcgttaagtagcgcatgtttggtccaggtatggaaatgctctgtgaggcggtaagtcgtgcccacgtacggaaactgctccttcttacccatgcgcagcgcatcttcttcatacagacgcgccgccgggttcgagaccacattcgggtgcagcgggttagtgcccagcggcgtttccatcggctcgtagtgttcagggaacggcccttccgccattttatcaatagcaaacagacgtcccagcccttccggctgcatgataaatggattggtcccgctccccggcgccgcgttgttaaagtccggaatatcgttccctgtccacttcgcgccgttccactggatcagcatccgttttggatcccacggtttaccctgcggatccgccgaagcgcggttatacaatacgcgacggtttagcggccatgcccacgcccaacccagagtattgccaagccctgacgggtcggcgttatcacgtctggacatctggttgccctgctccgtccagctaccggtataaatccagcaggaggaggatgtcgtaccgtcatcgcgcagtaatgcaaaactgctcaacaactggcctttcctggcaagcagtgtaccgttggcgtcatagagatcttccagcgcatagccgttgttctctttcgccacttcttccgaatgcggttcatccggctgcttgtagttccagctcatcttcaatagtggttcggcgcctttaccgccttctgcgcgatacatttcacgcagacgatggtaaataccggccagaatctcgccgtcgttacgcgcttcgcccggcgcgtcctgacctttccagtgccactgtaaccagcgaccggagttagcgatagagccatcctcttccgcaaaacaggtagacggcagacggaagacttcggtctgaatcgttgtcggatcgacatcattagattcgccgtggttctgccagaacgttgacgtttcagtcaccagcggatcgataacgaccagatacttcagtttgcttaagctttgcaccactttgtttttgtccgggaaggacgccaccgggttaaagccctgacagaaatagccggtgactttcccgctatccatcatgttgaaatatttgatcacgtcataggactgatcccacttaggcagccaggcaaagccccagtcattctcttgctgcgccgcatcgccatagaaagatttcatcaggctgacgaagaacttaggataattaccccagtagttgacctgatcggccagcgtcgctttgggggtattcgctgccagataagtttgcagatcggcctgtttttccgatggcagcgtcagataacccggcaggctggtggagagcagtcctaaatccgttaagccctgaatattagagtggccgcgcaaggcgttcacaccgccgccagccatccccatattgccgagcagcaactggatcatcgccatagtacggatgttctgcgccccgacggtatgttgcgtccagcccagcgcatacaggaaggtggtagtgcgatccggaacgctggtagaggccaacacctcacacaccttcaggaaatccgctttcggcgtaccgcagatgttttccacgacgtccggcgtgtagcgcgaaacgtgctgcttcagcagattccacacacagcgtgggtgcgtcaacgtttcatcacgtttggcatagccgttttcatcaaactggtagttccaggaggatttatcgtactgacgcttttgggcgtcatagccgctgaaaagaccgtcatcaaaggcaaaatcatcccgcaccagcaggctggcgttggtgtaatgcttaacgtattcagcgttgattttgttattttcgatcaggtacagcaaaacgccggacagaaaggtaatgtctgtaccggaacgtattggcgcatagatatccgccaccgacgccgtacgcgtaaagcgtggatcaacgacaatcagcgtcgcatcgttattgtttttcgcttccatcgcccagcggaaacccaccggatgcgcttctgcggcattgccgcccatcaccatcacgacgttggcgtttttaatatccacccagtggttggtcatcgcaccgcgaccaaatgttggagcaagacttgctaccgttggtccgtgtcaaacgcgcgcctggttatctaccgccagcataccgagagaacgcgcaaacttctgcgtcagcatacccgtttcattgctggccgccgaggcgcacagcattccggtagagagccagcggttaaccgtgacgccctgctcattcttttcaataaagttggcgtcgcggtcggctttcattaatttagcaatacgagtgaaagcgtcatcccagctaatgcgctgccacttgtcggaacccggcgcgcggtattccggatagcgtaggcgatcttcactgtgaacatagtccagcaaaccggcccctttcgggcacagcgcgccacggcttaccggatgatccgggtcgccttcaatatggtaaatcgcttctttcgcgttttttgccccatctcccaggctatacattaatagcccgcaacctacggaacagtatgtgcaggagttacggatctcttttgcgcgcaacagcttatagtttcgcgcctgagccagggccattttaggggtaaaacccagtgcggccaccgttgttcccgccataccgcccgcgcagattttaaaaaattgtctgcggctgacgtccattgctttcctcttttttccacggatgcacgcctccttcgaactgcagcaaaacctcagcccaggatgcgtgtataacttcgcgaggaaactaacagcaaaatcgataacttttttgcgtcaaatcaatattgaaacggttccgctattaaatagccctatttttaaactgcaataactccagggaggtactaaaaaatgacactgcatggcatcgccctcggaaaaagtgctataagtggcagtttattttgcgcggtattcaggacagtcacaaagcatgacatcacaaaaagcaacgctaatagggcttgttgccatcgttctgtggagcacgatggttgggttaattcgcggcgtcagcgaaggtctcggaccggtaggcggcgcagccatgatctattcattaagcggtctgctgctgatttttaccgtcggattacctgatatccgccgtttcccggggcgatacctcatcgcaggcagcgtactgtttgtcagttatgaaatatgcctggcgctttctctcggttatgccgccactcgccatcaggctatcgaagtcggcatggttaactatttatggcccagcctgaccattctgtttgccattctttttaatgggcaaaaaactaactggcttattgttcctggattgcttattgcacttactggcgtttgctgggttctggggggcgagaatggtcttaatcccggagaaattatcagcaatgtcgccaccagtccgctaagttatttactggcatttcttggggcgtttatatgggcgacgtactgcacggtcaccaataaatatgcgcgtggttttaacggtatcaccgtctttgtgttactcaccgccgtggcgctgtggttacactattttcttacgccgcaacctgccatgatatttagcctaccggtgattgctaaactttttaccgcggcattaacgctggggtttgcctacgcagcatggaatgtgggcatacttcatggcaatgtgactatcatggccgtagggtcttattttacccccgtcatgtcctctgctctggcagcgctgttactcagctcaccactgtcattctccttctggcaaggcgcagtcatggtttgcgtaggttcgctactttgttggctggcaacgcggcggcgctaatagcgacgggcgggccgatattgatattaaatcgacccgctgtaccttgacactcttcataacacaactacgcttttatctattgcctgtgcgtatttaacgattttccattttcacgtgctcctcctgcgccataccaggattgcgctggtaaaaatgaattttataaaatcgttaaatatgttaatgtaatgatgtaattatattaacaaatatataattaacgttagcttgcaactgttattagtgcatataataatcagtggttactaccaaaaataaaaccataaacagcccaatagtcccctccgaaaatatatcttattagacagtccctatttgaattaatactctcaaatgtattaaggagatctcgatcacacaaattaaaataatttgtaatcttatgaaacttattattgaacttatgccactccgtcatttaaaaatagtctgccattgacaaacgcctcgtttaacaatggttgaggaaacacgctaagaaaattataaggattattaaaatgaaacttaagttagtggcagtggcagtgacttccctgttggcagcaggcgttgtaaatgcagccgaggtatataacaaagacggcaataaactggatctgtacggtaaagttcacgctcagcattatttctctgatgataacggaagtgatggtgacaaaacttacgcgcgtctgggctttaaaggcgaaacgcagatcaacgatcagttaaccggttttggccagtgggaatatgaattcaaaggcaaccgtactgaaagccagggcgctgacaaagacaaaacccgtctggcgtttgctggtctgaaattcgctgactacggttctttcgactacggtcgtaactacggcgttgcttacgacatcggcgcatggaccgacgttctgccagagtttggtggcgatacctggactcagactgacgtcttcatgactggccgtactactggtgttgccacctaccgtaacactgacttctttggcctggttgaaggtctgaactttgccgcgcagtaccagggcaaaaacgaccgtgacggcgcgtacgagtctaacggcgacggtttcggtctgtccgcaacgtatgagtacgaaggttttggcgtaggtgcggcctatgcgaagtctgaccgtactaacaaccaggtgaaagcagcgagcaacctgaatgctgcgggtaaaaacgctgaagtctgggctgctggtctgaaatatgatgcgaacaacatctacctggcgaccacctactccgaaacgctgaacatgaccaccttcggtgaagatgcagcgggtgatgcgtttatcgcgaataaaacccagaacttcgaagcggttgctcagtatcagttcgacttcggtctgcgtccgtccatcgcttacctgaaatccaaaggtaaaaacctgggtacttacggcgaccaggatctggttgagtacatcgatgttggcgcaacctactacttcaacaaaaacatgtccaccttcgttgattacaaaatcaacctgctggacgacagcgacttcaccaaagcggctaaagtgtctaccgacaacatcgttgctgttggtctgaactaccagttctaattttgttgtagtctgaatacaaagccagtcctttcagggctggctttttctcttgatgtagactcggtcataaggagtatgccgtgcagacgttcactggtcgttgtctttgcggacagagccattttaccgttgacgtcgaaatgctggatgtctatgcctgccattgtacgctgtgtcaaaaatggtcgggtggaatagccatgtatctggaagcctgcgggcaaccacagctagcccccctttccccggaaccgccatacttttcatcctcttcgcgcggcgaacgctacttctgttccggctgcgggtgtccgctgtggtttcggcttaccgataccgatcgctattttattccctggaccttactggaactgaacgaagttgatcgccgtcggctgattctggctgcggaaatttataccgagacccaacctgccttctggcgactgacggggcaatacgcacgcctcagcggtaaagaggttgaggaaatggactccccctgccagctagcgcattaagcgcttatctcaccaggcgttatgttatcggcgttgggcttttgccaggctgaaccacatccctaccgccagcaaaagaagcatactcccggcgctgcttaacgccacgctatgcgaccagataaaggcatgtctggcggcgtccagtattgcctgcccctgcgtgggcggtaggctattcgccaactgcacggcttctcccattgaagatgacgctctggcaatctcttgcgcctcaagcccggcaggcagacggatagacgcggagaagctacggcttaacaacagaccgaaaatggcaatgcccagtcccgcgcccagttcataagccatcgtttctatcgcgccggccgccgccgctttttctgccggcgcagcggccataattgccgacgtggaagccagcaatgcgctggcggcgctaaatcccagcagcgccatcagcccccaggcctgccattgttgggtgctgaaatccgtcatcgccaggccataaaaactcagcgcgcttaacgccatgccgcccgtcgcgaccagccgtagtcccagacgcgagaccagcacgcccgcaatcggcccgctgaatccactggcgaccattaccggcagcataaataccccggcctcataaggcgatagcccgtgaacaaactgcagctcttgcgccatcagcagctcaaaacccaccagagtgatcatcgcggtcatcgccatcacgacgccgctcaggataatgcgatgggtaaatagtcgcatatcaatcatcggacgcgatgtcgcaagctgtgtgcggataaagagtcccaggagcagcgcgccggtaagcagggtaaacgagataacccacagcgacagatgccctttcagcgcggttttagcgctatagaccaacagcaaaatggcaataatcagcatcaccgcatggccaagattgagcggttgatcgcgacggcccgcctggcgaggaacatagcgggcggttaagcccatgacgaccagcacaatcggcacgttgatcaggaaaaccgatccccagtaaaaatgctctaataatatgccgccgatgagcggcccaaacgccgctccgcccgaacctaccgctgcccagacgcccagcgccatgttgcgatgcttctcttcacaaaaggtagcgcgtattccggccagcgtcgccggtacaatcatcgccgcgccaatagccagtaataccctggtggcgataagccaactggcggtatgcgaaaacgctgccgccaatgacgccaggccaaagagcgtcccgcccagcatcagcaggcgtttaaaaccgatacgatcgccaagtgcgcccatcggcaacaccatgccagccatgaccaaagaataaatatcaatgatccacagcagctcgttgccgctggcccccagtgtcatactcagtgtcggcgcggcgacatgcaagaccgtggcatcaatggcgacaggaatatagaccagcacaataatgactaacgttaaccactgacgaaacataactctcccttcaaaaactcaaatttggacgcttgtccagcttcaggatcctacggtaagttgaacgaatgtccagctttttgttacactgcgcgcattggctaatgtggggaaatatgagttaccttaaccgggatgaacgccgcgaagtgatcctgcaagcggcgatgcgcgtggcgctggcagaggggtttgccgccatgacggtgcgacgaatcgcatcagaagccgatgtcgccgccggccaggtgcatcaccacttcagctcggcgggcgagctcaaagcgctggcctttgtccatttgatccgcaccctgcttgatgccgggcaagttccgccgcccgccacctggcgtgcacggcttcacgctatgttgggtagcgaagacggcggctttgagccttacataaaattgtggcgagaggcgcaaattctggccgaccgggatccgcacatcagagatgcttatctcctcacgatgcagatgtggcatgaggaaacggtcacaattatcgagcagggcaaacaggcaggagaatttacgtttactgctaacgccacggatatcgcctggcggcttatcgcactggtgtgcgggctggacggtatgtatgtactggggattccggaaatggccgatcccgcgtttaaattccatctggatcgtatgattacgcttgaactctttgcgtaaagttacaaataatttaataaaaatcgcttttaatttacaaatagtaacaattaagaaacatcatatctcctcatcgcgccgcgctggcctggttttttatctattctttcactcaatattctaaaaaaacttcaataagttctcaaaagagcgcgtgacgctctgtctcttttttgtgtttttcttcaaatgatatgcgcatgtgaggggtaaaatgacacgacaaaacgagaattataaccgttatctcttgagtgactggcgacccgaaaatccagccttctgggagaataaagggaaaggcatcgccagaagaaacttatggatttcagtaagttgtttgctcctggcattttgcgtctggatgttgtttagcgctgttgccgtcaacctcaataaaattggatttaattttaccaccgaccaactctttttattaaccgcattaccttctctttccggcgcaatattacgcgttccctactcctttatggtgccactgtttggtggtcgtaaatggaccgtattaagcaccgtaatattgattattccctgcgcctggctgggattcgccgtacaaaatcccgccacccctttcggggtatttatgctcatcgctctgttgtgcggttttgcgggggcaaacttcgcgtccagtatgggcaacatcagttttttctttccaaaagccagacaaggtagcgcgttgggtattaacggcggactgggaaatcttggcgtcagtgtgatgcagttgattgcgccgctggttatttttctgccgatatttacttttttaggcgtccagggcgtgccgcaacctgatggctccctgctcgccctcactaacgccgcctggatctgggtgccgttactggctgtcgcgacgcttgccgcctggtttggtatgaacgatatcggcagttcaaaagcgtctgtcgcctcgcaattgccggtgctaaaacgtctgcacctgtggctgcttagcctgctgtacctggcgacattcgggtcattcatcggcttttccgcaggtttcgccatgctcgccaaaacgcaatttcccgacgtaaacattctgcaactggcgttctttggcccctttatcggcgcgctggcgcgatcggcaggcggcgtgatctccgataaattcggcggcgttcgcgtaacgctcattaattttatctttatggcgctgtttaccgccttgctattcctcacgctgccaggctccggcgcaggcagctttagcgcgttctatcttgtttttatgggcctgtttttgacagcgggtctcggcagcggttctaccttccagatgattgcggtgatcttccggcagatcacgctctacaacgtcaaactgcgcggcgggagcgatgagcaggcgcagcgcgaagcggtgacggataccgccgccgcgctcggttttatctccgctattggcgctgtgggcggcttctttattccaaaagcgtttggcacctctttggccttgaccggctcgccggtgggcgccatgaaaatctttttgctgttttacctcgcttgcgtcctgctgacctggctggtctacgggcgtcgtaagcctaaacaacaataacaacatacgcacctgtaggacggccatccggtaatggtttaacgccaaatcgacaggatggcggaaaatttatcgaagcaggagaaatgtcatgagtaaactgttggatcgctttcgttactttaaacaaaaaggcgatacctttgccgacggccatggtcaggtgatgcataccaaccgcgactgggaagacagttatcgccagcgctggcagtttgataagatcgtgcgctcaacccacggcgtcaactgcacgggctcctgtagctggaaaatttatgtcaaaaacggtctggtgacgtgggaaacccagcaaaccgactacccgcgcacgcgtcccgatttaccgaaccatgaaccgcgcggctgcccgcgcggcgccagctactcctggtatctctatagcgccaatcgtctgaaataccctctggtgcgtaagcggctgatagaactgtggcgcgaggctctttcccggcacagcgatccggtgctggcatgggaatctataatgaacgacccgcaaaaatgccaaagttacaaacaggtgcgcggacatggcggctttattcgttcgaactggaaagagctgaatcagctcattgccgccgctaacgtctggacaatcaaaacctatggtccggatcgtgtggcggggttttcacctattccagcaatgtcgatggtttcttacgccgccggaacacgttatctgtcattgcttggcggtacttgtctgagcttctatgactggtattgcgatcttccgcccgcgtcgccaatgacctggggcgagcagactgacgtgccggagtccgccgactggtataactcagcctacattattgcctggggctctaacgtgccgcagacgcgtaccccggacgcccacttctttaccgaagtgcgctacaaaggcaccaagacgatcgccatcaccccggactattccgaagtcgctaaactgtgcgatcagtggctggcgccaaagcaaggtaccgacagcgcgctggcgatggccatgggtcacgttattttaaaagagtttcatctcgataatcccagcgactattttcttaactattgccgccgttataccgacatgccaatgctggtcctgttggatgagcgcgcagacggcagttatgtaccggggcgtatgatgcgcgcgtcggatctggtggatggactgggagaagccaataatccggaatggaaaaccgtcgcgctcaacagtacgggcgaactggtcgcgcccaacggttctatcggttttcgctggggcgaaaagggaaaatggaacctggaaccggtggcggcgggcgtcgaaactgaactgtcgctctctttactcggtcagcatgatgacgtggcgggtgtcgctttcccctattttggcggcaacgaaaacccacattttcgcagcgtgcggcaggaaccggtgctggtacgtcagttaccggtgaaacgcctggctctggcggacggtagcgagcggatggtcgtcagtgtttacgatctggtgctggcgaattatgggctggatcgtggtctggatgacggccatagcgccaataattataacgacgtaaaagcctacacgccggcctggggcgaacagattaccggcgtgccgcgtcgacatatcgaaactattgcgcgtgaatttgccgagaccgcccataaaactcacggtcgttcgatgatcatcctcggcgcgggagtgaatcactggtatcacatggatatgaattaccgtgggatgattaacatgctggtgttctgcggctgtgttggacaaaccggcggcggctgggcgcactatgtcggccaggagaagctgcggccgcaaaccggctggctgccgctggccttcgcgctggactggaatcgcccgccgcgtcagatgaacagtacctcgtttttctacaaccatgccagccagtggcgctatgaaaaactgactgcgcaagagttgctgtcgccgctggccgatccggctaaattttccggacacctgatcgatttcaacgtgcgcgcggaacgtatgggctggctaccctcggcgccgcagcttaatcttaacccgctcagcgtgaaagcgagcgccgataaagccgggctgtctgcggcggattataccgtgcaggcgttgaaatcaggcgctatccgttttgcctgcgaacagcctgacagtggtcataatcacccgcgaaatttatttgtctggcgctctaacctgctcggctcctccgggaaaggtcatgagtacatgctcaaatatctgctgggcacagacagcggtatccagggcgaagcgctgggttccagcgaaggaattaagcctgaagaggtggaatggcagtccaccgcgattgagggcaagctcgatctgttggtcacgcttgatttccgtatgtccagtacctgtctgttttccgatatcgttttgccgaccgccacctggtatgaaaaagacgatatgaatacctcggatatgcatccgtttatccaccccctttccgctgcggtcgatcctgcctgggaatccaaaagcgactgggagatctacaaaggtatcgccagcgtcttttctgaagtgtgtgtcggacacctcggacaggaaaccgatgtggtgctacacccgctccagcatgattccccggcggaactggcgcagccatttgatattctcgactggcgtaaaggcgagtgcgaacttattccgggcaaaaccgcccccaatatcgtcgtggttgaacgcgattatccggccacctatgaacgttttacctcgctgggtcccctgctggataaattaggcaacggcggtaaggggattgcctggaatacgcaagatgaagtcgatttcctcggtaagctcaattacaccaaacacgatggcccggcgaaaggacgtccgcgaatagacaccgcgctggatgcttcggaagtgattcttgccttagcgccggaaactaacggccaggtggcggtgaaagcctggcaggcattgggcgagatgaccgggcgcgagcacacccatctggccatcaataaagaagatgagaaaattcgctttcgtgatatccaggcgcaaccgcgcaaaattatctccagcccgacctggtcaggactggaaagcgagcatgtctcttataacgccggatataccaacgtacatgaactgatcccgtggcgcacgttgtcggggcggcaacaactctatcaggatcatgcgtggatgcgcgcttttggcgaaagcctggtggcatatcgtccgccgattgatacccgcagcgtcagcgaaatgcgagaaattccgcccaacggtttcccggaaaaagcgcttaacttcctgacgccgcaccagaaatggggaattcactccacctacagcgaaaacctgctgatgctgaccttgtcgcgcggcgggccgattgtctggatcagcgaagccgatgcccgtgaattgggtattgaagataacgactggattgaagccttcaacgctaatggcgcccttaccgctcgtgcggtggtcagccagcgcgtcccgccgggtatgaccatgatgtaccacgcccaggagcggattatgaacattccgggttcggaagtgaccgggatgcgcggcgggatccataactccgtgacccgggtctgtccaaaaccgacgcatatgatcggcggctatgcgcaactggcttacggcttcaactattacggaaccgtgggttcgaatcgcgatgaattcatcatgatcaggaagatgaaaaacattaactggctggatgatgagggccgggatcaggtacaggaggcgaaaaaatgaaaatacgctcacaggttgggatggtactgaatctcgataaatgtattggctgtcacacctgctccgtcacctgtaaaaacgtctggaccggacgtgaagggatggaatacgcatggttcaataacgtcgaaactaaaccaggcatcggctatcccaaaaactgggaggaccagcaggagtggcaaggcggttgggttcgtgatgttaatggcaagataaggccccgtctgggcggcaaaatgggggtaattagcaaaattttcgccaacccggtgattccgcaaatcgatgattactatgaaccctttaccttcgattatcagcatttacataatgcgccggagagtaagcatcagcccactgcccgccctcgttcactgatcgacggaaaacggatggacaaggtgatctgggggccaaactgggaagagctgctcggcggcgagtttgaaaaacgcgcccgcgaccgcaacttcgacaacatacaaaaagagatgtacggtcagttcgaaaacaccttcatgatgtacctgccgcgcctgtgcgaacactgcctgaaccccagttgtgtcgccacctgcccaagtggcgctatttataagcgtgaagaagacggcatcgtgctaatcgaccaggataaatgccgaggctggcgtttgtgtatcagcggctgcccgtacaaaaaaatctactttaactggaagagcggcaagtctgagaagtgcatattctgctatccgcgtattgaatccggccagccgaccgtttgctcggaaacctgcgtcgggcgcattcgttatcttggcgttctgctctacgacgccgacaggattgaagaagcggccagtaccgaacacgagacggatttgtatgaacgtcagtgcgatgtgtttctcaatccgcacgatccggcggtcatcgaagaggcgcttaaacaaggcatcccgcaaaacgtcatcgacgccgcccaacggtcgccggtgtacaaaatggcgatggactggaagctggcgcttccgctgcacccggaataccgtaccctgccgatggtctggtacgtaccgccgctatcgcccatccagtcatacgctgacgcgggcgggttgccgcacaatggcaatattctgccggcggtggaaacgctgcgtattccagtccagtacctggccaatatgctcagcgcgggcgataccggcccggtcattcgggcgctaaagcggatgatggcgatgcgccactacatgcgctcgcagacggttgaaggcgtgacggatacccgcgccattgaggaagtcggtctgagcatacaacaggttgaagagatgtatcgctacctggcgattgccaattatgaagatcgttttgtcattcccaccagccaccgggaaatggcgcgcgatgcctttccggagcgcaacggctgcggctttacttttggcgacggttgccacgggtcggataccaaattcaacctgttcaacagtagccgtattgatgccatcaatatcaccgaagtacgtgataaagcggagggggaataatgcaaatcctcaaagcgattggcctgttgatggagtatccggacgacgagttgtgggaatgtcgggatgaagcgctcacccttatccaacacgatgcgccaatgctggccgacttcactcgcgagctgctttatgcgccgttactggataaacaagcagaatggtgtgaagtgtttgaccgcgggcgcgccacttcattgctgttattcgagcatgttcatgcggagtcccgcgatcgcggccaggcgatggtcgatttgttaagccaatatgaaaccgtgggcctgcacctcaactgccgcgaactgccggatcacctgccgctctatctggagtacttaagcgtgttgccggaagcggaagcgcgcgagggattacagaatattgcccctattctggcgctactgggcggtcgcctgaaacagcgaggagcgccgtggtatcaactgtttgacgccctgctgacgctggcgggcagcacgcttacaagtgacagtgtcaccaaacagattattcaggaatcgcgggatgatacccgtcaggcactggatgccgtctgggaagaagaacaggtgaagtttatcgaagataacgccacgacctgtgacagttcaccgttacaccattatcaacgacgctttagccaggacgcggcgccgcagtacgtcgacgtcagcgcgggaggcccgaaatgatacagtacctgaacgtctttttttacgacatctacccctatatttgcgccacggtattcttcctcggcagttggctgcgctatgactacggacaatatacctggcgcgcgtcgtccagccagatgctggacaagcgtgggatggtgatatggtcgaatctgttccatattggcattctggggatcttctttggccatctgtttgggatgctaacgccacactggatgtatgcctggttcctgccgattgcggtaaagcagcagatggcgatgatcctcggcggcgtgtgcggcgtattaacgttgatcggcggcgcgggattactgtggcgtcgtctgaccaatcagcgtgtgcgggcgacatccactacacctgatattatcatcatgagcattttgctgattcagtgcctgcttggcctgagcaccattccgttttcggcgcaatatccggatggcagcgaaatgatgaagttggtgggctgggcgcaaagtattgtcaccttccgcggcgggtcttcggaaatgctgagcggtgtggcgtttgttttccgcgttcatctggtgctgggaatgactattttcctgctcttcccgttcacccgtctggttcatgtctggagcgcgccgtttgagtatttcacccgtcgctaccagattgttcgtacccgccgctaattctctttgcccggggatacgcttaccgggcaaagaaaaacgcctgggcgtcgtcattcggcaacgcacaggctatgatgattcttcagtcaaaggagaacatcaatgaaaccgcagatttaccatgttgacgccttcaccggcgacccctttcgcggcaactctgctggcgttgtcttacatgcggatacgctaagcgacgcgcagatgcagctgattgcccgtgaacttcgtcactcggaaaccgcctttttgctaaaaagcgaagagagtgatgtgcgcatacgctactttacaccgacagtagaagtccccatctgtggtcatgccaccgtggccgcgcattatgttcgggcaacggtactggggttgggaaacaccaccgtctggcaaacctcgttagcgggccgtcatcgcgttgaaattcatgccgaacacaacgactatcgcatcacgctggaacaaggtcagccctcttttgaaccaccgctagtcggagagattcgggctgccatcatcaccgcactgaacctgactgaagatgatatcgtgccgggagcgccaattcaggtggcttcaacaggacatgcaaaagtgatgatcctgctcaaaccagacgttgatattgatgccctttctcctaatctggcagccctgacggcaatcagccagcaaattggctgtaacggcttttttcctttccagattcgtccgggaaaaaacgaaaccgatgggcgaatgttttccccggcgataggaattgtggaagatccggtaacgggaaacgccaatggcccgatgggggcatggctcgtccatcatggcctgatggcgcatgacggtaaaacgctgcagattcaaggccatcaggggcgcgctttaggcaaagagggtactgttgatgttaccgtcaccattcgcgataaccagccggaaaacgtcaccatctccggccaggcggtcattctgtttcatgccgaatgggccattactttttaatctttgtcaggcccgcaaatcctcgcggcaaaaaattattttcccgcctctggatgggtatcaaatgcagccattaccgcggccagctccgcctcggtaaaaccgtgctttacatcatttacgccgagaccaaactgctgctgaagtaactgatacaacgacggtacatccggtacattgacctgttcaacggcatgtccctggtggtaacgcgtgaagtggaaattcgttaatgtcagcttgccgccatcaggcaaatggcggcacatcaacaaatgatgacgaaaatgggattgcggccagtgagccgaccagaaattgcccatcacatgatcgctctgctgctgcacccccagatcaaaacagtacatcgactgccagtgctcatggtggcggaattgtaaaatccatgtgcttccctcctgcatcaggcggtattcgccatgcggcgtttgctgggcaatttcagcctgcagacgaagcggtgcggttagcgtttggccgccaaaccccacgtccgcgatccactgctcatcctcaacatcaaccagcagcaaacggtgcgtgcgcggcggtaaactggcgggatgagacagaatgacccgccccaataagcttcggacgttaaaaccgatgtcgcgtaacgcgcgttcaaacaggccattcagttcaaaacagtatccaccgcgtcgggcataaagcagtttctcctctaatgccgtctcatcgagctgtatttcacgaggcagtagcacatccagattttcaaaaggaatcgcgcagttgtgcgctaagtgaagcgttctgagcgcttcaaccgtaggaacccccaacggctgacaatgtaatcgcgtaaaataagcatgtaaaaaagaggtcatctgaggcttccattaacattaatgcttgcgttcggcacacaggctgaggcggatatcgctgcgcaacaggataccctatccgtggaatagcgttggatacttttgaaaaaaataagacaggccggctgtcgcgccggaggtacgtggaattttggcgtacaaacggaaatcgggttctgagaatctctttgcgacacgccgccaaaatagcggcgtgttaaaatttttaacgccggctcagcgagtctgatttctaacaaaactggctaaacataaacgctttttaataattgtccaaatagttatggtagcgagcttttatgtcggccgcccattgcgctttcgcctcctgcatgttgctggcccgagcgatataatattctaaacacggaatggcgcctaatgcctgaggtaaggcattatatgctgccattcgctctctgacggttttatatttttcatcaatatcataatcatagtacgctggcgcttcaaaaaagccctcttccagtctcatacaaatctcttcaaaggtcccctcaacctcaacggtatgttccccatccgatatcctgacgattggcttaccttcagctatcagcgagagttgttcgaatgttaacatccgaccatcagaaagctcgacatctatagtaaacagtccatcacgtacagcatcagcaaggtgattatggatattccctgcattggcacagaactccgcaactttaggcgtaacattacaataatgttcaattactcgcgtaaatccgtaggccagtcctgcggtaagcacatacaagatgcctttcatgatttttgttgataatttattttcataatctcctgcagcaacatgaggtagcttatttcctgataaagctctggcataggtagaaactgatgtatatggcatatcctactccttcaaattttgctcaatagctttatatgtcctactcctctctcattatgacgatatgtcaatcaacaaaattgctcaaaggcatacattttcaggagaaaatgagaataacaggcgcaacggcctgatcttatgctgcttcaatatcgtcaggtggtttatcgttcgaggtcatatctatgaccataaatccctgcagggattaaccctgattaattattgcgcaacgcaatcactgccgatttgtgctggcgtcttatctggctgaatcgtgaccacaccgcaccacatctgaccacacaaataaactcgacatcctcattttgttctttccgtatgttttgcgtcatttaacaattgcaggtaggatgctccgccggcggttttatccctgtcacagaatcagggaaaagcggcattcgccattgcaggcaatcgattggtgagcgcccgtcgcggcataaggaatttttctgtcaggacaggctataacaggtaacgtaatgaaaacacagactacgcacgccgcagaacaacatgcggcgaaacgacgctggctgaacgcccatgaagaggggtatcacaaagcgatggggaatcgtcaggttcagatgattgctatcggcggcgcgattggcaccggtttatttttaggtgcaggcgcccgattgcaaatggccggaccggcactggcgctggtctatctgatatgcggcattttttcttttttcattttacgcgcgctgggcgaactggtattgcatcgcccttccagcgggagcttcgtctcctacgcccgtgaatttttgggtgaaaaagcggcctacgtcgcaggctggatgtactttattaactgggcgatgaccgggatcgtcgatatcaccgcagtggcgttatacatgcactactggggcgcatttggcgacgttccgcaatgggtgttcgcgctcggcgcgttaaccattgtcggtaccatgaacatgatcggcgtaaaatggtttgccgaaatggagttctggttcgcgctgataaaagtactcgccattgttatcttcctggtggtaggcacgatttttctcggtaccggtcaaccgcttgagggtaatgccaccggttttcacctgattacagataatggcggctttttcccgcacggcctgttgcccgcgctggtactgattcagggcgtggtgttcgcttttgcttcgattgaactggtcggtaccgccgctggggagtgcaaagatccacagaagatggtgccaaaagccatcaatagcgtgatctggcgtattggtcttttctatgtaggatcggtcgtattgctggttttgctgctgccgtggaacgcctaccaggcggggcaaagtccgtttgtcaccttcttttctaaacttggcgtgccttatatcggcagtattatgaatatcgtggtgttaaccgccgcgctttccagcctgaactccgggctttactgtacggggagaattttacgttcaatgtcgatggggggttccgcgccgaaattcatggcgaaaatgagccgtcagcatgtgccctatgcgggtattctggcgactctggtggtttacgtggtcggcgtgttcctgaattacctggtcccctcccgcgtgttcgagatcgttcttaattttgcctcgctcggcattatcgcgtcgtgggcgtttatcatggtgtgccagatgcgtttacgccaggcgataaaagaaggcaaagccgcagacgtcagttttaaactgcccggcgcgccttttacctcctggctaacactgctgtttttactaagcgtgctggtactcatggcgtttgactacccgaatggaacttatactatcgcctcgttgccgctgatcgctattctgctggtcgccggctggtttggcgtgcgacgtcgcgtggcggagatccatcgcactgcgccagtgacggcggattcgacagagagtgtcgtattgaaagaagaagcagcgacataacattccccttccccggcagccccaggcctgccgggtttaatgcgcgttgccgccaacaccgcatcgcgcccaatgcttagtcagccttaatcaactgcgccacatcattgctgttaatttcccgctggttgccttcctgatcggtataactggtcatccccgtctctttatctaactgcggcttaccctgagttacgatcgtttgcccattcttcgtcgtcatcacatagttggttgtacaacccgcaagcataaaaaacatcatgcccaaacctgagcatataaataactttttcatattttcctcgtgaatataatgagttaactacagcaaaaaggcagtgtaattctcacagaatcatcaggctatcggcggggtgtaacgaggcgtatcggtgcgtttaaagagatgactggaggggtttccccctccataccctatttacagagcaatgcgaataacatcatccggctgcgtcgcttcctgttcacgtgtcgatttctgcttcacgctgacgtagagcgttttaccgtctgccgatagcgccaggctattcgggtacgtcggcgtatcgaacgttttaacaacgttataggtcttcgcatcgatcacgctgacctgacctgcctgacgatgtgtcacatacgcctcgttacgtgtcgggttaaacaggacggccaaagaagcaggcgccgcgattttggcaagaatattgccattacgggtatcgacaaccagaacctcagtcgccttcgagtcggtgataaacgcgcgatgacctgcggtatcgagactcaggttaataaagaagtgttctttaccgtcatccagcaacttcttacgactgagaattttattgctggcggtatcgatagtgataaattcgccatccgcattggtggtgtacaggcgttgcgctttactgtcgagcgccagacccgtactcattttgccggtattttcgatcgtcgttttcagtttgatggtttcgccatccactacccaaatagcactctctttaccaacaccgctaatgtagatcgtgttggtcgccgcatcggcaaccagctcacggggctgtaacggacgaacctcttcagtacgtttgcgcgcatcaagtaccagacgaccttttacatcacccgttttggcatcaatcgcggtaactgcgctgttaatggtattgccaaaccacagcgtttgggtcgcggcattgatggtggcgccgaacggcttgagatcgttatgaatcgcttgcgtgatttccagcgtcaccgggtcgagacgataaactacgccgcctttatccagtttacggctttgcgatgtagccagccagagcgcgttttcttgctgactccaggccatctcataagcgcctttgcctaccgctttacgcagcatgtcttccgccgccagcgtgctaaatgaggatgcgacgaggagcgaacctaacaataaagaaccacgcaggcgcggcgaaaaaagatgacgtaagtgcatgacgactccctttgataaaaacgtgtatagctgcttcacactacttcgctgcgcgggatcttcgttccgcacttattataagttgagaataataatcattatttatcagaaagtggagcttttcctcgcctgcgaatgtcatggctcttaaataccgcacattttcttaacttaatgtgcgattaaaatttcaaaactttacatattgactacccttaatgtcacgttttccgttgatacgcttacatttatccggcattttcatgaaaattatttccgttagacagcgactttatcccgccctcttattgcctctgaccttctccccggtccttcaggccgccagcgcgcccaatgaacaaaccatgatagtcaccgcaacgccgcaaaccgtatccgagctggatacacctgccgccgttagcgtcattgagggagaagacatgcgtctggcgacgcctcgcgttaatttatctgagtctttaaccagcgtcccgggattgcaggtgcagaaccggcagaactacgcgcaggatctgcaaatctctatccgtggatttggctcgcgttccgcctttggcgtgcgcggcattcgtctgtatgttgatggcattcccgccaccatgccggatggacaaggccagatttcgaatattgatattaacagcatacaagacgttgaagtgttacgcggccccttctcagcgctatacggcaatgcttccggcggcgtaataaatgtcaccaccgaaaccgggagacaaccgcccacccttgaggccagcagctactacggcagttatggaagctggcgctatggactaaaagccacgggcgcgatgggtgacggcacacagccaggcgacgtgtattacacggtatcgactacccgtttcaccacccacggctaccgcgatcacagcggcgcgcgaaaaaatctggctaatgccaaactgggcgtgcgccttgacgatgtcagtaaactctcgctgatttttaatagtgtggacattaaggcggacgatcccggcggacttaccgaatctgaatggaaagccgatccgcaacaggcgccgcgcgctgaacagtacaatacgcgtaaaaccatcaaacaaactcaggcaggattgcgttatgaacgtcagctcagcgcgcaggatgatatcagcgtgatggcctacgccggagagcgggaaaccacgcaataccagtctattcccctggtggcacagctaaaaccagcccaggctggcggcgtaattacactgcaacgccactatcagggcattgattcccgctggactcaccggggagaattaggtgtgccggtcaccttcactggcggagtaaattatgaaaatatgagcgaaaaccgcaagggttacaataatttccgtctcaacaacggcacccctgagttcgggcataaaggcgatttacggcgggatgagcgtaacctgatgtggaatgtcgatccttatctgcaaacccagtggcagcttacgcaaaaactctcgctggatgctggcgtgcgctacagttccgtgtggttcgattctaacgatcactatatcgcgcccggcaatggcgatgacagcggcgacgccagctatcaccactggctacccgccggatcgctaaaatatgcgttaactgacgcctggaatctctatcttgctgccggtcgcggatttgaaactcccactatcaatgagctttcttatcgcgctgacggccaaagcgggttcaactttgacctcaaaccgtcgaccaatgatacggtggaagtcggcagtaaaacgcggattggcaacggcttgttgaccgccgcgttatttcaaaccgataccgatgatgaaattgtcgtcgccagcagtatgggaggacgcactacctacaaaaacgcgggcaaaacgcgccgccagggcgcagaacttgcgttggaccagcgcttcgccggcgactggcgggtgaaagcatcatggacctggctggatgcgacctatcgcagtaacgtttgtcaggggcaaaactgtgatggaaaccggatgcccggcatcgcccgtaatatgggattcgcctcattaggttttatcccggatgaggggtggtacgccggaacagacgttcggtatatgggcgatatcatggccaatgatgaaaataccgccaaagcgccttcgtataccgttgttggactaaatacagggtataaatttaattacagtcagcttaccgtcgatatttttgggcgggtagataatctatttgataaagaatatataggttcggtgatcgttaatgaatctaatggccgatattatgagccagcgccagggcgtaactatggcgtggggattaatctggcatggcaatttgaataaatatccggcaaatatccggcaatagcggggaatccccgctattgataagtcatagtttcatgaaagttacatgaagtactgatttttaatcgtcgctacgttttgttgcaaaacgttctgtaggcagtggcgactggcttctttatcaccagtcactaacgcattaagcaattttctgtacagattaacgccgttttgataatcatcaagtttaaaattatcatataaaaaatgcagacttggccccaggcgtacccataattgctcgatcatggcatacagcgttggcatatccgcgtagtggtagatctcaaagcggaatgcgcggttggccaaaagaattttctccataacgccactttccagcgcctgttgaaattcatctaatagcgcattcagcgtctgctcgcgatccggggtaatcttacccgcagcggcgaccaccgccatctcctccagggcagtacgaatcgtattaatttccagcaaactttccagcgagatctccggcaccataaacgcctgtgctggcgccaccgccaaagcactggaagagaccagccttaacagggcctcacgcaccggcgtaatactgacgcctaactcttgagcgatatttttagtgataagccttgcgcctggttttaatgcgccaatagacaattgatgctttaaccgattttcaacctgtgtggtcaggcttatatgttgtgttttttccgtacccggcattttccttccttcacctcttggcagaacaacatcgcaatcgagtcccgaagaagtttcggaacttaattgtaaaaaagataatccaggcctgaacggccaaataaataaaagtgataatttacttgcgtgatattctcatcttttacaacaatacaggtttctttatggcaaccgttttatctccgtcattccttcatgtatcgagatttttgaccggttcaggccgctgagggagataagctgccccaccgcgatctgaatgatgaatataagtaaagccgcaattttaaaatttgcacatttttatggcgacataatgccgccattttttctttacgcatcgtccgctaaacgtatcacgactttgccaaagttcttccccgccagcagccccataaacgcttctggcgcattttccagcccatcagtaatctgttcccgataatgtattttcccttctttgatccaacgccccatttcttgctgaaactcatgtatccggtgaccatagtcctggttgatgataaaaccttgcagacgaatacgctttttaagtaatgtcgccatcagcagaggcagtctgtctggaccgtccggcaacgctgtcgcattgtagccgctgaccagaccgcagagcggaatccgcgccgacgtattcagtagcggtaagacggcgtcaaagactttaccaccgacattctcataatagatatcgataccctgcgggcaggcctgcgcaagctgttgtgggaaattatcagcgtgatgatcaaggcacagatcaaatcccaaaacgtctgtcgcatgacggcatttttccgcgccgccagcaatacccacgacccggcagcccttcagcttgccaatttgcccaaccgttgcgcctacggggccggtggcggcggcgacaaccagcgtttcgccctctttcggctggccgatatccagtaaccccatataggcggtaaaccccggcattcctaaaatacccaatgaccaggaaggatgttgcggattatcacccagctttaccaacccttcgccatctgaaatgtcataatcctgccaaccattgtaactcaacacccattcgtctggtcggtaatcaggatgattcgacgcgacaacgcgactgaccgtaccgccaaccataacgcagccaggttcaacaggcggcgcataagagggttcatcgctcatgcggccacgcatataagggtcgagtgataaaaaaacggtacgcaatagcacctgcccttcaccgggcgtcgcgacgtcatcttcttcgaggcggaagttatccatctgcggcgcgccgtggggacgcgaggccaaaacccaacgacgatttcggttggtctgttgcttcattctattctcctcatgcctggcataatccatcaataatagtcgaacattagctttctgagggagttaaacactctcagatatcaggctgtgcgcttttatgaacgactttctcccccttctcgctaaatatgaattcttgcgctaattcgttgatttatgccgccttcaatagtatttctaacactatcgtaaacattccctggggttccctatgacgattcgctttgccgataaagcagactgcgccgcgattaccgaaatctataaccatgcggtattacatactgcggccatctggaatgatcggacggtcgatacggataatcgccttgcctggtatgaggcccgtcaattactgggctatccggtgctggtaagcgaagaaaatggcgtggtgactggctatgcatcatttggcgattggcgcagtttcgacggttttcgctataccgtcgagcactcggtttatgttcatccggcgcaccaggggaaaggactggggcgaaagctgctcagcagactgatcgacgaagcccgacgctgcggcaagcatgtgatggtggccggtattgagtcacagaatgccgcctcgatacgcctacatcattcgctgggatttaccgtcaccgcgcaaatgccgcaggtcggcgtaaaatttggccgttggttagatcttacgtttatgcagctccagcttgatgaacacgccgcgccggacgcctgctgatgaaccagtcgctgacgctcatctttttgatcgccgccggtgtcgggctggtggtacaaaacagtattatggtgcgtattacgcagacatcatcgacgattctgatcgctatgctgttgaactcgctggtagggatcgttttatttgtgacgatattgtggtttaagcaaggcgctacgggcttcggcgagctggtcgccagcgttcgctggtggacattgatccccggtctgctggggtcattttttgtatttgccagcattagcgggtatcagaacgttggcgccgcgacgactatcgcggtactggtcgccagccagttaatcggcggactggcgctggatatcgcgcgtagccacggcgtcacgttacgcgcaatggtcgggccggcgtttggcgcgctgttgctggtcattggcgcatggctgattgcgaagcgccagttttaatgggttacaggatcgtgccgcctttggtgagctgctcgcggcgcgcgtcccgatcttcttgatattgcctgccgtgatgcgcgatagccgtgcgtaaacgctgctgctgcacataacgatcttcgcgacgtaattcagcgtcatcgctcaaggcaatcagcaattcattcatatgggcaattacgctctccgcgatggcggcatccacgcgggcgctcacttcctccaggtgcgacataagctctcctactctttattctgtaacagcatgattcgcctattatacgcgttattgtcgcccgatgcggtaattcgccgccgccaccctgatttaacttacgtcaagtggaaacacggggcttaatagaccgagaattcgcgcctttttgcctttcttccgccgtttgcttgcgtatagaccccgtaaagtagacgcgtgaagaagtctaagggataacaacgtggcaaaatctctcttgcgcagcggcaatctggatgattatcaggccgtgggcggcggcggtcaggccgtatttgaatcagcattgcaaattcgcgaaacgcttcgtctgcgtaaacagcaggcgatggttgactgtctggcgattccgcaacttaacgataatggcgatcgggttgactggtattcgccgattgaaggtcaggcgatagcgtggaaagcggctgacgaagagacacgttctcgggctttacgttatttagccagcacttttgaaagcgcggctgcactcagtcgcaaaagtctgcaatccggtaaaacagcgctccagctatttggttcgctacttgagaaagcgacgcaatttcccggtgaaaatcatgttttcctggttaacggcaaaccggttatcaccttctggggattcgttaatctcaacgaaaatacacgcgatgatgtgctggactgcctgcgggtaaccgaggcaatccccgacatccctctggtcgagccggagcccgaagaaaagccgctggtagaggcggcatttagtcaggcggatgaacctttgttaacgtctgtcattgagccgccgaaaatgccggaggaacctgctgcgccgcccgttatcgttagcgagccgaagcctgccgcacctatcccggttgctgaggcgaaaagagctcgtcgtctaccgctgtggagcttacctgtcgctgccgtggttatcgccgccgtcgccacgccttttttctggccatcttcatccgttgacggggcctctcctgttcgcgccgcgcctgtcgctaccgcgaaaactgacgttacccccttgcctgaactcaccgcgcatttgccgctgcatcgcgctgaggtgacgcccgcccccaaagcggcgccgttgccggaagcgcctgttatcattgccgctatccccaaagacgcgctggtgatggacaatacgcagatgaagcttggaaccacgcgctttttaaacggtagctggcgcatcagtgtggatgtcaaagatccgattaccggcaagccgccctctctgcgttatcagatccaaaataacaaaggcatcgcgcgcgtagtacatggcgataacgtggtttgtcgggcggaaattttctctggtctgcatcaaacgggcgagctgatgattaaaagtcgcggcaatgcgcgctgcaccgacggttcacgttatccgatgccggaaattacctgtaaagcaggcgtcaatgacgtcgcaacctgtaccgcccgttatggcgaccacgcggcaattccgttgacgtttaaaaagataggtgcctgattttatgttggtcaatctgtgtgattacaaacagagcgtcacgctcattgcaaacagcggcgtccagtttcttgattttggcttaacgccgcaagagtcggcccactacggacgttttgtgcgcaaaacggcaaacggcccgctactgcgcctcgattttgatctggccagcgggcgctacacgttgccaggacgtgctggcggccaacccgaagtcgtgaaaccggaaagcactcagacgctgcactattctctggatgtactcgacggaatctggctccccctgccgttcctgcgttttaatccgccgcgtacctttattgacgggccggataactgggcgcgcattcaggtacgtaaactcagcgagccagatagcgccggaaacacacaccgcatcaccctcgccttcgacagtcagctggcaaaaaatatgcctgcggcgttggcgccttgcgaaaacgatctgctcaatggcacacgttttgcgctcgcctggcgcgatgaagaagttgccgattttcttgaccagacatggattgacggctggctgcgcgagtcgtttcttcagtatgcctcacaggtggaaaaccgttcggaacaggccattcagcaagcgctgcgtagttttgagtatcaggcgcactggttgaatttactgacgctgttaggcgaacagcttacggtgccggaagtgaagtttgtgacacatacgttaagcacgcccgcaatcccggtcgatctgattctggatgtcggcaatacgcatacctgcggcgtcttgatcgaggatcatggcgatgcgaatgacgggttacgccagacggcagagcttcaggtgcgttctttaagcgagccgcagtatctgaacgatcctttatttaccagccgggtagaattctcggaagcacgctttggcaagcaacacttttctgtcgaaagcggacgagacgacgcctttgtctggccttccattgtgcgtgtgggcgacgaggctcgcgcccttgctatgcagcgtgtgggcaccgaaggcagcagcggtatctccagcccacgtcgctacctgtgggatgaaacccccgccttgcaggactggcgttttagccagatccacggtaaaacgcagcgcgaaccgcttgccaccgcgtttccgctgatgaatctgatgaacgatgacggacagccgttattccgcctgccgtatgaagaaaggctaccggttttttcgccgcaatacagccgtagcaccttgatgacgcatatgttgtgcgaaattctggctcaggcgctggggcaaattaacagcgtcgccacccggctgcggctcggctttcccgcctcgccgcgccagctacgcaccctgattttaacgctgccttccgccatgccgaaacaggagcgagaaattttccgccagcgaatgtttgaagcgctggcgctggtctggaaagccatgggctggcatccgcaggatgaggatttcaccacgcctaagcagcgtgaaaaaagcgtggtgccggtaccagaaatacagatggaatgggacgaagcaagttgcggccaactggtatggctttataacgaagccatttcgcattacgccgggcgtaccgaatccttttttaatgcgctggccagaccggatcgccagcctgaacccggcgtcgtccccgggcgcgcgttgcgcgtggcatcgattgatatcggcggcggcacgacggatatggcgatcgttcactatcagttagatgacggcgtgggggccaatgtaaaaattacgcctcatctcctgtttcgcgaaggttttaaagtcgccggggacgatctgctattagatatcattcagcgttgcgtactcccttccctgcaaacggcgttgcaacgggcaggcgttacggatgccgccgccctgctggcgaccttatttggcgattcgggacgaattgatactcaggccattttgcgccagcaaacggcgctgcaattatttatgccgctgggccatgcggtactttccgcctgggagcaaagcgacattaacgatccgtttgccggtttacatgcgacatttggcgatctgctgatccgccgcccaacgagcaacgtgatgaactatatccagcaggcgatcgatcatgccttaccgtctggttcgccgacatttgatatattcaatgtgccgttgcaaatccagtttagccagcttcaggagtctctgctggccggtcagtttacgctgacaacgccgcttcatgcggtctgcgaagcgatatcccactatcactgcgatatcttgctggtgacggggagaccgacctgtttacccggcgtacaggcgctcatccggcacttacaaccggtgccggttaatcgcattgtgtggatggataagtatcaggtacatgaatggtatcccttcagtcaacaagggcgtatcggtaatccaaaatccactgccgcggtgggcgcgatgttatgcagcctggcgctggacttacgtctgccgcgtttcaattttaaagcggctgatatcggcgcgtattcgactgtacgttatctcggcgtactggataataccgttaatacccttcgcgatgaaaacatctggtatcacgaaatcgatttggataaacccggcgcaacgctggacgctcgcttgcattttccgctacgcggtaacgtgacgttgggctttcgtcaactggcgaacagtcgctggccagcaacaccactttattgcctgagcattaattccgccgaactggcgaaaaccatcgctggcgacggcgtactgaatgtgcgactgaaattacgcggcagtagcaaagatagcgccccggaatcgttcatattaagtgatgcctggctccaggacgggacgccggtcgccgccgatgcgctgacattaaaattgaatacgctggctgaccgtcgccacagcggcagccactactggatagatagtgggagtgtatacctgaaatgacaaaaccgttaaacaccacccaggctgttatcgagtgggttaacaacacgcgccgttacgcaacgcgactggatgacgaagccgacgctctgctggcgcaacttacgcttgccgcggcggatgagtcagcgctcaacgccgcctgcgcatcacatggctgcgttggtctgtacgggtatgcgcaatccgcaaaagcgcatctgttaacgacgctatgcggtaacgagaatggcaagctggaaattatcacgccggaccgtgactatgattatttcagccacatcaatccgggtcatgcgccagcgaatatggctattcgctttacgcgcgacattttttcaaacgagagcggctggccgttgcgcctgcgcttgatcagtgaagccgaactggtgcagatctttattgcctggaccagctcgtcccccgtttgtcgccaggtcgaaaaatccattatcacatcacgcctggagaaatggcaatcgcttcgccaaccgcagcccgtccccggcgttaccgctgaagaggtagcgaccatcgcgagtttctggcgctcttgcctgccgtccgccagacaacatattgatgatgcgacatggcaacactttgcctcgctcttgcctgcgctggatctcacgacacgggcgcacgcctgggcattactgtggggagagcaaccggagatcacccagcaatggctggcgctggcgcatatgttgcaacaaaccggccatgccggggaactggcggcgccgctcagcctgctggtcgatcattttggcttaccggcggaaaacttcctgacgcaaatggcgctaaccgccaacgatacgcaaagcgatgtggtggtgcatccggttaaggaaggccgactgctcaatgcggtcagcctttcgcttgattctctggcgctgcttacccgcgaactggtgctaagcgttgaaaacaacgtactggataacgtagatttactggatattccggtcgcgccagacagtcatcctcatccgttatggcgggcgaaattaggttggatgctggcccattaccgccaacaggtacagcccgatgttctggtgatttgcaatgctctggcatctcgctcgcaaacgtccactgccgcccatcacttactggagtgggttaacgccacgcagccgcagcatgaatcagcgttacccggcgtcgtctgggctattactccacaggatgcccgttttgccacccagcaaaatctggatgaagccgtccagcagttgatgggtaaacctggcgtgcattggggaacgttgcaggcgctggataaacacagtatgcagcgtttggtggaatggttatcgcaggcgacatcggcaccacagcgacaggcgcgcttacaggcgttacgcgaacaactgcgaggccgcgtgcgcgatctgttaccgatgtttgatgacgcgcggctaccggttgaaaccgtgatccggcgtcttcaggcccaggccgccagacatggcgacctgctggccgggctgttaccgccggtacagaacttcgaagcgttgctgagcacccgacagtcacgagaagaacaggtctgcggtttatttaatgacgcgatcgatctctttgccgacgaaccaacgcgcgcttcagcgtcagaaggtcacgaaacaggctaccaggcgcacaaaatgtggatcaatcatctgcgccagtgggcccactgccgggataatgcgcagcgtctgggactggaaccgcagatgctcaacgccgtggcggagattttaattaccgccagctatcgcctcggtttacctcagcagttacagaaaaccatgcagcgcgaggaggtgagcggcgcgcagcttcatgccatcattggtaacttcatcgcctggctcggctacgccaatatcgaggaggcccaacgcccggccagccgcgttcagaaaggcgcagccattttcgccgcaacaccgcgttcgacaatgttgcgtctaacaaagcttgacgaacagcccgttcatgccgccagccgctatgtctatgactggcttgttgcgctgtataccctggccaatgagaacgcaggatatcggcatccgcaggacgttaccgacgtagacagagcgcaattaattgccctgatagcctgacctggcggaaaaaccatgcccggtaacctgtatcgggcttgaggtcagaaaagcgaaaacagcaatgcgacggggaaacttatcggccatgtcgcgccaaccaaaaaggcgctcaggaaacgaattcgttttttgtcatgagtcaaaaaccaggtgatcagggatgatatcaccgccatgacggcgtaaaaaattaatatcttttgaaagagggtcatatcaggcatccacgccaaccagaggaaaaaacgcgcgcaatatgctctttttatttgacgcacatcaaggtttatcagccttaacagcaaaacgttctcaatgcacggctccgctcacagaatatcctgtttaggtattattgcggatctcgccaacccgtactatacccataggggttatgatgaaaggtggcgaaaatgaatgtttccagtaaaaccgtcgtgctgattaatgtctttgctgctgcaggacttttgggtctgatctcgttgagattcggctggtttgcttgaggtgttcaacctttgagtacttgctgcgcatgttggcggggaggtccccctctccgccgacacccgcctattttttcacgatttttctgaacagtaaatgatccttaatgcttaaccatgatgtggcggacaagggtgtagtcttccagaccatacaatgacatatctttgccgtatcccgactgtttttgccctccatgcggcatttcgctaaccaacatgaaatgggtattaatccaggtacagccatactgcaatctggcgctaagccggtgcgcccgcccgacgtcctgagtccagacggaggatgccagaccatagcgagaatcgttggcccacctcagaacctgatcttcatcatcaaagacggttatactgaccaccgggccgaagacctcgcgttgcacgatggcatcttcctgttttgcgtctgccagcaacgtcggagcgaaatagtaacctttaccttccgtttgacttccgccagtaatcacacggatatggctgagggccttcgcctcctctacagccgctgtgacgcgcttcaggtgcgccagcgaacttaacggccccagctctgtcgactcatcctccggcgcgcccattttcaggctgctcactgcgttccctagcttttcgaccagcgcatcatagataccgcgctgcgcgtatatacggcacgccgcagtacaatcctgtccggcattatagaaaccaaaagtccggacgccctgcgccaccgcatccagatcggcgtcatcaaaaacaatcaccggggctttaccaccgagttccatatgcgtacgttttatcgctggcgcagtatggcgcagaatatgctccccggtcgcgatagaaccggttaaagagaccatgcgtactttttcatggccggtcaatacatcgccaacagtttgccctcgtccgaacaggacattgagcacccccggcggaaagatatccttcgccagcacggcaagtttaagcgccgtcagcggcgtgatttcagaaggcttaatcaccacgcagttacctgccgccagcgctggcgccagcttccaggccgccatcatgagcggataattccacggcgcgatagaggcaaccacgccaatcggatcccggcggatcatcgacgtatgtccttccagatattcgcccgccgccagcccactcaaacaacgggccgcgccggcaaaaaagcgaaagacatccacgattgccggaatttcatcattaattacgcagtgcaaaggcttaccgcagttttgcgattcaagccgggcgaactcaagggcgttttgctcgatgctgtccgccagttttaacagacattccgcccgtgctttgggtgtggtctgcccccattcggcaaacgcgttatcggcggcctgcactgcggcgtcaacctgcgcgggcgacgcttccgcaatctcaagtatgacctcgcctgtcgccgggttataaacagactgcctttctccctcgccgtccaccagcacgccattaatcagtaattgatattgcatagcattttcccatatcgtcattaatcgatttccggcgaacgggccgccgctttcctaaaaatagacggcgcgccagatgctcacccggcacactcgggaaatttagtcaggttgtgagctgacacgcattccacctcacacaaggcttttagcgctcagcatctcgcgaatcaggctgccaagctgttttacggcctgttcttcccgttctccccaatgccatgcggtgttaaaacgaaagaaacgcgtccaggcgccggacgttgaaaacattttccccggcgcgatactgataaggtgttcaagcgctttggcgctaagttcaccggcatcaagctgctcaggtagctccagccaaagaaaataaccgctatcgttatggtgaatttttacttccgccgggagatggcgcaaaagggtttgccaggcttgctgtttacgttcggcaagctgccttcgcaatcgtcgcagatgcgcgtcatatcgacgtgtcgagagataatccactaacgccaattgcatgggggaactggtggataatgtgctcattaactgcaaacgctgaatttgtctggcatggcttcctcccgcaacccagccaatgcgaaaaccgggaaccagacatttggaaaaagacgaacaatgcaacacggtatcgtcgcgatcccatgctttggcaggcagaggtttctcgcggccaaagtagagttcgctataaacatcgtcttcaattagcgtcacgttatggtgcgtgagtaacgcaaccagccgcgcttttttctcagcactcagcgtgaaccctaacggattctggctgttggtcattaaccagcacgctttcaccggatattcctgtaacgcctgttccagcgccataagatcgataccttctttaacatcggtaggtatcgacaacgctttcaggcgcaatcgctccagggcctgtagcgcaccgtagaaacaggggttctccaccaccacccagtctcccggcgccgtcaccgcctgtaaactaagattcaacgcttccagcgcgccggcggtaatgacaatctcgtcaggagaaacggtaatcccctgctgcgcgtaacggcgtgctatcgcatagcgcaattctgcattacctggcggcaagttttcgatgacgctcattgccgtcgcggttttgctgacctgcgccagagagcggttcaattgcggcaagggaaacagacgcggatcgggaaacgctgaggcaaagggcaccacagaggtatcacggctcgcctgcagcatctcaaaaatataggtattgatatctacggcttcatcccgaataacgtgcgctgccgtcgcgactgaccgacaaaccggatgcggcgcgacataataaccagattgcggacgggcgataatccgtccctgactttccagcaactggtacgcatgaccgacagtcataaaactcatgccgctactggcgacctgctccctcagcgagggtaatcgatcgccgggttgccaaacgccagaggcgatttgttctctaatttgctccgccagacgttgatattttttcattattcgatctcattgagcgctgcttgcaggtggcaaccgcagtgtatatcagttgttaaaattaacaatgatttgctaactgttatggtgctttccaacaggcgtaatgattagatttcgcaacaaaacgccgtttcagggtctctgcttaacgggaaagtcaaaccaagtgttcgggtatggttcatgagtaagagagaagtgccaccattcagtatccagtggcgtaaaacccgcatcacgcatcaatgtttgtaataacaacctatttgcgcgttgctgagcggtaagtatgacattatcgggatgggataacggactaaaacagtcaaagccggtaccaaaatccagactattatctggcgagcgttgcgccgcggacgcagtacaattcaccagtggtcgtccgggatcgtatattggtattttactgtcaagtggaacaatcgttagatcaagcgtacttccccgactgtggccggatctggcggcaagataaccttcctcaaacagacgatttttctctacctgcggataaaattcgtttttcatttggttttgagaaggatctttggcccacgcgataaagtcgttcactgcgctttgcggacggtagcaatcatatatttttaaggtaagtccgaaggggcgtaaacgatcggcgacctgcttcactgcgttcgcggctggtcgtgttaacaggcaaacaggcgcgttatagcctttaatggggcgaccaataaagttatgggaactgaagtatcgcatgtctacctgtacgtcgggggcgaccgtagtaatatcgacaaagtcttttggctggtggagatcaatatggttttcagctgacattgcctgaacggacaacaggctgaacaggaggaaagaagatacgcattttaccatatgttacacctcgcgagagtcacaggggtgattatgtatttgagcaggtaaagattagcggacaccgcttaaacagatggttaaaataaacatctttccccctgtaatctgtgccttatcacaaacggagagtttatattttgcttatacgaccactgcgcctcctgttctatacccaaaataattcgagttgcgtaaaggcggcaagggagtgagtctcaggagcacagataacgatgtgttttcacaaaggcgagtctacctgaccagaaaggtcatttgataatcagtagtacagttgttgtcgccttccataactaaataacattgtttcgccaaagataagaccactatatagtcaggaaggcaattagtgaggaacacgtcgattgtcggcgataatgcactgaaattacgattcactgcagttgtgcaaacacatagaatccccctcgaaccgagataattcggtctgctggtcatagccattattcagtaagaccgcaggttgcagcggcggatcacgggcgtgaagaaacatcctgtgccccaaattttttggacaagcgctgaacctgccgtatacttttacttaacgtacactccgccataaaaataaaccctgcgatgataccgtaatgccataggcataacttaaggatatgccataaatcaagcgaagcatgatttaacttctcagtaattgcgatagtctgtacaaatattatgggatgaaataataagatgcctaacaaaaatatccctgccacgatcatggcaagtaactgaaaaaaagcccatccgataacgaaacggtaaagtaacagcaataatagccgtccacatttccttagccattctgactgcaaaatgccccaggatgctgtcttttcgtgaatttcaccatctgatttcttcattttgagcctcctcgcaggtttttataattttatcgcccaactggaaacaaagccgtcagctaatcgttacaacaaatataattaagacaaaaactaaagagtaagatatttatatcataagcactatcagtattggccttctgccctaccgctaaacatctcattgttgttagcctaataatacttttagtttaacttcttataagacaatttctacacggttgagcaactatttactttctctaaaaataatatagtgcgtaattaatcattactcatagtacatgatgatgtgagaattaagaaaaccgttttactttcattcgttttatctgacatatttcatggccaggaggcgtgggcatgactaaagctacgggtcgatttgaacaattgaacaataatgttgacggttcaggacaaagcaaaaatcaggtgtttcaccgataggcaaaccgatgggcaacatgggataatatttcgaataccacctattccagtaatgaagtatcatataatcacttgtggtctacattatgccaattactatcgggagaggatttttaaagagtgagatgttttctcaaagtgctatctctcaacgctctttctttacgttactatgggaaaagattaaagattttttttgtgacacgcaaagatccactgccgatcaatatataaaggaattatgtgatgttgcctctccgcctgacgcgcaacgtttatttgatttattttgcaagttatatgaattatcatcaccgtcatgcagaggaaatttccattttcagcactataaagatgctgagtgtcagtatacaaatctctgtattaaagatggcgaagatattccgttatgtattatgatacgtcaggatcactactattatgagataatgaatagaacagtgctctgtgttgatactcagtctgcccacctgaaaagatattctgatattaatataaaagctagcacttatgtttgtgaaccgctatgttgcttgttccctgagcggttacaactctcgctatccggcggtataacattttccgttgacctaaaaaatatagaagagacgcttatcgccatggcagaaaagggtaatttatgtgactggaaggaacaggaaagaaaagccgccatctcctccaggattaatctgggcatcgcccaggcaggtgtaacagctattgacgacgctatcaaaaacaaaatagccgcaaaggttattgagaatactaacttaaagaatgcagcgtttgaaccaaattatgcacaaagctcagttactcaaattgtttattcatgtttgtttaagaatgagatactaatgaatatgctggaagaaagttcctctcatggcctgctatgtttaaacgagcttactgaatatgtagcgctacaagttcataacagccttttttctgaagatttatcttcactcgttgaaacaacaaaaaatgaggctcatcaccagagttgatcacaccataaatagtatggatttacaatcccctggcaataccaaaaccatctaatacaataactttaaatatatactcccagggaataatggatttactatggaacgaattggctcgttatttttataattgacatactgagtataagtatattttctcatacaacttatcgcacttattgacaaaccgttttcgctaatttgaagtgtggaataataactcaaagaaattattggcatcatagcctcacgacgtaactggaaggtggcatgatgcttacaaaaacgttatcagtagttttactgacctgtgcgctgttttcaggccagttactggcgaaacagcaagaccacgcattcgtatggtttgcgacgggagggcaccagcttagacacgaagccgacagcgatgaattacgggcggcagcggaagaatccgcggaaggcttgcgcgagcaccacaactggcagaaatcgcgcaaaccagaaagctattttcgttaattaaacgcccctgcgcttcggcagcgttttcatcagcgcttcagggctcactgaagcgacaacgctgccgggctggggcatttttaagatgtggtttttaattttgccaatgacatgcatttcgcaagggcggcagtcgaattttagcgtcagtacctcatcgccatgcaccaactgcatcggcgtggctttccagctcttaatatttcctttcgcctgctttggacaaaggttgaacgcaaaacgcaggcagtgtttggtgatcatgaccggtacctcgcccttctcctgatgcgcctcataggccgcatcaatcaattgtacgccgtaacggtgataaaattcccgcgctttgtggttgtagacattagcgagaaagctgagatgcgtttgcgggtagaccggcgcaggctgcgccacgggtttccgacgacctcgttgataatgggccagccgcgccgcgtcaagcatatcaatcgcctcccgacggaactgattgagcaggctatttggcacgaacaacgccgccggtaatgtcacctgcatatcacgcgcgtagtaaggcgtctgtcccagcttcgccagtccggcttttaggttattcaacgctttttcagagttgttggcttcctcaaataccccatcaagcgtatgcgtgatgcagacaccgtcttcactggtcagcgtcagaataagctgttcctgccagccgcccagcatgatatcaaccgccacacggcgctcactggaggtttttgtcagcgcttgctgccagttatgatccagattacgattcaacggatgatgcggacggactttatgcaggtcggcaggcatatcatttggccaaacgcggtagcggttatgaccggttttctccaccgtattggcgcgaaaacctaccacttcacgcttaatcaacacgttcagaccatcgccattcgccaacggctccgtagcttctacgtcgagataatccttcgccacattcagcacctcacctaccggcaagccaataaattttggtgaatcaaatgcgccaatatcacctttacgcgcgttaacaaaatagtcggtgctgccgcgatggaaggttttctccgtggagggaacaaaaaagtgttcggtccgaccaaccgacgcacgcgccagatcgccacgttgctcgataatcgcgtccagcatctgacgataatgcgcggtgatgtttttgacatagctcatgtctttatagcgcccttcaatcttgaaggaacgtacgcctgcatcgatcaacgcgccgaggttagccgtttggtcgttatctttcatcgatagcaaatgtttttcgtaagagaccacccgcccctgatcgtcttttaacgtatacggtaaacgacaggcctgcgaacagtcgccccgattggcgctgcgcccggtttgcgcatgagagatataacactgcccagaataagcgacacacagcgcgccatgaatgaagaactcaattgtggcgtcagtagcctgatgaatagccgctatctgactcaaattaagttcgcgcgccagtacaatctgtgaaaaaccgacatcggcaagaaacttcgctttttccacgctgcgaatatcacactgtgtactggcgtgaagctcaatcggcgggatatccagttccagaatgcccatatcctgcacaatcagcgcatccaccccggtgttgtacaaatcggtgattaaccgctgcgcgggctccagctcatcatcatgcagaatagtattcagcgtgacaaaaatcctggcgccgtaacggtgagcaaacggaaccagatcggcgatatcgcgcagactgttactggcgttatgacgtgcgccaaaaccgggtccgccgatgtagacggcatctgcgccatgcaaaatcgcttcgcgagcaattgcggcgtcacgggccggacttaacaattcgagatagtgaggttgctggcgcatacagtcgttcttatccaatagaagcgaaatggcggctattgtagtcagaagcgcaaactaacgaaatagttttcccgcttaatcacgtgggtaatggatcagcgagtgaaaatgaaccgtctggtcactgctgttgcgataggtatgcgccgtatcgccggcaaaacgcaaacctttaccggcgtctatggtttgccataccccaccagtacacatgtccagccgaccctgaatcaccaccacatgttcgataacgccggctttatgcggcgttgattcgctgaccgtgccaggcgccagcaatagggaaaaatagtcaaaacagagttcaggatcccatggaaacaacggtgtgattaccatcgcttgctgctggggatcgaaggtcggaggaaattcggcctgcggcggcgaaataaacactgagaatggaacgttcaggcccgtcgcaattttccacagcgttgcgactgtcggactggattcattacgctctatctgccccaacatggcttttgagacgccggagatctccgccagacgcgataaactccagcctcgctgatggcgtaacgttcttaacgtggtcgccagatagtgtgtcaggttatccattttcccccctgtaaggccatagcgtatcacttgtacgctataacgcacaatgctacattgactgaccgttataacgcacaagaggcgatcatgcgtctgttatcactgccgttacctactgtattatctggtctggtcgccgttctggtcggctatgcgagttccgccgccattatctggcaggcggcgcttgccgctggcgcaacacccgcagagatcgccggctggatgaccgccctcggtatagccatgggcataagcacactaacgttaaccttgtggtatcgtgcgccggttttaaccgcctggtcaacgcctggcgccgctctgttggtaacagggcttcagggattatcgttgccagacgccgtgggcatattcattgtcgccaatgccctgattgtgctgtgcggcgtcacgggattgtttgcgcgtttgatgcggataatcccccattctcttgccgccgcaatgctggcgggaatactgctacgcttcggcctgcaggcgttcgggacgctcaacggagagtttgtcatgtgcggcggtatgctattggcgtggctactctttaaagtattcgcgccccgctatgccgttattgctgccatggtaatgggaataacggtggcgctcatccagggtaaggtggcgatgagcggtattcatttcgcgccggtgtggcccaccttcgttccccccacttttcattcgctcaaagcctgagcgtcgcggtaccgctcttcctggtgacgatggcatcgcaaaacgcccccggcgtcgccacaatgaaggcgtctggctatcagcttcctgtctctccgttaatgatttttaccgggttgctggcgctgctgctttcgccatttggcgtttattctatctgcattgccgccattacagccgccatttgtcaaagcccggacgcgcaccccgatccaacgcgtcgctggttagcggccgccgccgcaggcgttttttatttacttgccgggtggtttggcggttcgataaccgcgctgatggtcgccctgccggttagctgggtgcaaatgctggctggtctggcactgttaagtacgattagcggtagcctgtatcaggcgcttactcacgaaagtgagcgtgacgcggcagttatcgcatttctcgtcaccgccagcgggctaacgctgatgggcatcggatcggcattctgggggttgatcgctggcggaataggctacgcagtattaacgagaacgcgccgcccatcgttgtctggctgatggtggccgctaatctgccggggtttgcgccatcttgcgatggcgccgcagaattattttttattaacgtcaaacatagaggtatccgtcgccatatcatccacgacctgtttcaacgtctcaaacgccattggcgtactggaattgctcaggtctttaccttcaccctggcgtactaccttgacgaccggcttgttggtcgcggcatctatcagctcaccttcaaaatagaggtgggtatccatggtccggtggcccgtcgccatttgcgtgcccgccacaatcagcgctacagggatcacctcatagaattgcagcccttctttgctggtatccacgcccgtaatcgccccgcggaaaatcaaactgcgcggccctggcgtcgtgaccagcggtttgcgctgttcaattgctgattttactttagtgttcgtataagccagcagtttatcaagaacttgctgcccgacctgggtcgttggtttggggacgggatagtatgttatcggattgtaaacaatactgtcatagttagagtcattgaaatgtggatctacccagcgcaacaccggtttccccgtggcggaggtagtttcctgcaggtccgaataattttttaagaatccagaatacttatccggctgtgtgactttagacgcacagccggataacgccagcaagccagtaagcactgcaactttaaataaagtatgagtacgcatgaaacgatccctttagtcttcgcaatgatgcaaaggaaataatagcaaaacgaaatcattctggatgcactaaaaatggtaacgacagcacaatttgaacgcggcgcccgacaaaaaaatgccgaacgcagcgagacttacagaacttgcatcgctcaggccgtttttctcgccagcatcgtagcaaagcgcagtttgatacggttgccattttcgtccgtgcggtgaagctcgccgacatcttcgttgtatttcagcatgtcccatccttcgtaatagcggcgtaattcgccttctttaaaagcgaacgggaatcccaccgtacagggaaagtccggcgtatccattgccgcaacaatcaaattatacccgccgggttttgtgcagcgttgcatattggcaattaaaccgggaatggtttgcgcctcaagaaacatcataaccaccgtcgagagaataaaatcgtattcgccgtcaaaggtcaatgtattcagatcgacaaggtcggtttgcagattatccagcccttctgccgctttaatacgctcaaggttagccatactggccggatttttatcccacgcggtaacgtcataaccgttcgcggccagatacagactattacggccattgccacatcctaaatccagcgttcggcctggcgcgacaacctttgccgccgccagcacatccgaatgcgtgcgggttaaaccgtatttctcagtaaagtaattttcgtcacgaacggtcatttttttcctccgttttcaacagtgcagcgcgctcagtgcgaataagcaacgtcccctgcaccagcaatagaaatgtacgaaccagcaataaagcgataatagcgttagtgaaaataaacagcgggacggccagaatatggaaaagccctgattcactaccgtgaccaagatgtaaccccgtggtcgccagcgcggaaacgccgaacgaaaaactccagaaggaagcattaaacggttgtgataaataccagggcattaatcgcagcataaataaaagctgtaacagaccgtagccgaatagcattttcgccagcgtgtcgccctccccgccattgacgctcagccaggcgctacaggcgaccagcgcgggcgccagttggatacccagcgacgtacgcagcaccgccggtaattcgccgcagctacgcagtcgctgcaaaataaccggctccagacttaaccacgaaaagacgcctgcgcctaaaaacaccagtccggcatcattgtaaccgagcgctccacaggccatagcgctgataaaattattcgctaccgtgggcagataaagtcctggggttgtcgcttcttccggatgcgctccgcgccaaagtcccgccgtctgccaggcggcatacgccagttgtatgacgacccccacgctgaatagcgcaacggccaacgggcgataccagggaacgaaaccgatcgcgaccagcatcgtggtggcgggaaacaggctgacaaaactgctcattaccggatgtcgcacttcagccatcacgctatggggaaagcgcaccagacggctaaggaacgccagggtcaagagtgcccaaataatcatcgccaggatcaccatgatgtcgccgggccagtggcttattccccatatctggctggcataacgccaggcgaatcccataccgatagtgccaaggacgatgccaaaatagcccgcaggcagattgagcacgcgatcgctctgcttgtgattacgcattttgtttaatttataaagtatatttgaaatgcattttatggaatttctggttgtttcgccagtacctttgctacggttatcttaatcgttcacacggaatttccctatgaccaaatatcgactgagtgaagaacctcgtgcttttacttatcaggtagacggtgagaagaaaagcgtcttattacgacaagttattgccgtaacggattttaacgatgttaaagccggaacctccggcggctgggttgatgccggtaatgtgctgtcacaacagggggattgctggatttatgatgaaaacgcgatggcctttgcgggcacggaaattacgggtaacgcgcgtatcacgcagccgtgctcgctctacaataacgtgcgaataggcgataacgtctggattgatcgctctgatatcagcgatggcgcgcggataagtgacaacgtcaccattcagtcctcttccgtgcgcggagagtgtgcgatttatggcgatgcccgcgtgttaaaccagtcagaaattctcgccgttcagggactaacgcatgaacatgcgcagattttacaaatttacgatcgcgccaccgtgaaccattcgcggattgtccatcaggtacagctttatggcgacgccactatcactctcgcttttattgagcaccgggcggaggtctttgatttcgcgctcatcgaaggcaacaaagacaataatgtctggatctgtgactgcgccaaagtctatggccatgcgcgggttatcgccggcacagaggaagatgctatccctacccttcgctacagctcgcaggtagcggaacatgcgttaatcgaaggcaactgtgtgttaaaacatcatgtgctggtaggcggacatgctgagatacgcggaggcccgattttactggacgaccgcgtgctgattgaaggccaggcctgtatacagggcgaaattctgattgagcaccaggtcgagattagcggacgggcgacggttatagcctttgacggcaatactattcacctgcgcggcccaaaagtgatcaatggcgaggatcgtattacgcgtacccccttagtcggttccctttaatccgcatcaataatgcgggcatacatattaacgtcgtgatagtcgccgttaagatactccgcctgcttcatacagccctccagcgtaaaatggttgcgccgtgcgactgcgttactggcctgattatcaacgcggcatttaatgacgaagcgccgaatatcgccgcgccgggcataatgtgtcatcagcgcctgtaatgattgcgacattatcccttgtccctggaaggactcatccagccagtaaccgatataggcggctttgtttatcggttcgatggcattaaatgagagtacgcctgccatctcattctggcagaaaatcaggtacattttggcgtaaccacgctggtgcaacagtatattaccctgcacatgcttacgcgtttcctcctgcgacgtgacatattgcggccagtcgagcgactgttgtagccacgctttgtttttgagtaccagttggtgcagcgccggaacatgactttcatctgccgctcgcagttccagcgtcgtgctaacaggaataatttccaccatcgcgttgcccttcttcgttgttggtcgtgatcacataaatagcctggtttaccgataacccgcaggtgatatgagcgtttttattgtatcgccatcacattattttttattggccatatttagcgtatttccgcgtgacacatttcacacttatccaaccattctccgcctataaaacgctcaacgactgattgttttatcaccacggagacgccaatgaccttttctgtgcaggaaacgcttttttctttactgcggctaaacgggatttcaggacatgaaaacagtattgcaaacgttatgcagcacgcgtttgaacagcaggccaaagacgtctggcgggatcgcttaggcaatgtcgtcgcccgttatggcagcgataaacccgacgcgcttcgcctgatgatttttgcgcatatggatgaagtgggttttatggtacgcaagatcgaaccctccggttttttacgttttgaacgcgtaggcggcccggcgcaaattactatgcccggttcgattgtgacgcttgccggacgttcaggcgatatcatgggctgtatcggtattaaagcatatcacttcgcgaagggtgacgagcgcacccagccacccgcgctcgataaactctggattgatatcggcgcaaaagataaagcggatgccgaacgaatgggtattcaggtggggacgccagtaaccctttacaacccgccgcactgtctgggcaacgacctggtatgcagtaaggcgctggatgacaggctggggtgtacggcgctactgggcgtcgccgaggccctcgcctccacaccgcttgatatcgcggtattcctggtcgcgtcggtacaggaagagttcaatattcgcggcattattcccgttttacgacgcgtgcgccccgacctggcgattggtattgatatcaccccctcctgcgacacgcctgacctgcaggattactcagatgtgcgggtcaaccacggcgtcggcatcacctgtctgaactatcacggacgcggtacgttggcgggactgattacgccgccgcgtttgctgcggatgctggagaccaccgcgcacgaaaataatattcccgtacagcgtgaagtcgcgccaggcgtcatcaccgaaaccggctacattcaggttgaactggacggtattccctgcgccagtctttctattccctgccgctatacccactcgccagccgaagtcgccagcctgcgcgacctggctgattgtatccgtttactgactgcgctggccaacatgtcgccagaacagtttcccattgagcctgaaacaggcgctacacaagaggcacgaccatgatgaaaaagatccttgtggcatgtggtaccggcatgtcgacatcaaccatgattgcacaaaaactgcaggactttcttgcggagcaaggcattgcggcaaccacggcgcaatgttgtctgaatgagatcccgttgaactgtaacggtatggatctcatcgtaacgtccatgcgtacgcacagtgactatggcatcccgacgctcaacggcgccgccctgctgacaggcatcaacgacgacgcattaaaacaagaaatcaaggcgctgttaacacaataaagggggcattatgtttgattacatcctgtctctcggcggcaccgtttttgtgcccatcattatgattatcatcggcttaatctttcgtattccctggctgcaggcagtgaaagccggggtgacggtcggcatcggttttgtcggcatggggttggtgatcgtcatggcgatcgacagtctcagtccgccgattaaagtgatgattgagcgttttggcctgacgctgcatgtgtttgacgtcggcgccgggcccgcatccggcgtcggctatgcgacggccatcggcgcgatgatcattcccgttatctttctgctcaacgtcggtatgctggtgactcgtctgaccaaaaccatgaacgttgatatttataactactggcactacgccattaccggaacggtcgtccagttgatgaccggcagtctgatttatggcgtactgggcgcgatttgccacgccgccttgtcgttgaaaatggccgactggacggcgaaacgggtacagaacattgtgggtctggaagggatttctattccgcaagggtatggctccagttccgtgccgttgttcgtattgctggatgcgatatacgaaaaaataccgtttatgaaaggacgcaatattgatgctcaggagatccaaaaacggtatgggatggttggcgacccggtgatcattggcgttgttctcgggctgatcttcggacttgccgcaggcgaaggctttaaagggtgcgcaaccttaatgattaccgtggcggcgattatggtgctgtttccgcgcatgattcgccttatcgttgagggattaatgcccatttccgacggcgcgcgtaagttcttccagaaacactttaaagggcgcgaagtctttatcggtctggataccgcagtgacgttaggccacccgaccaccatcgcggttggactgctgttaattcccatcatgttaattctggcgagcatactgccgggcaataaagtcctgccgctggctgatttaccggttgcgccgttttttatctgcatggccacggttattcatcgcggcgatctgattcgtactctgctcagcggcatcattgtcatgattaccgttctgctgatcgccacccagttcgcaccgtactttaccgatatggcgctcaaaggcggctttagcttcgccgctgaaaacgcgcaaattaccgcgctgtcggtgggaaatatgtttggctggtcaatatctgaattgatgtcgctgggcatgattggcgtggttattgtggtcggcattgtcgccagcatcatacttgtcttacgtaaacgtgaactaccggaataaggagcaacccagaatgagttggctaaaagaggtaataggaacagaaaaagccgttatcgccatgtgccatttacgggcgttgccgggcgatcccgggttcgataccaggaaaggcatgaactgggtaattgaccgcgcccatgacgatttaatggcgctacaaaatggcggcgtggatgcggtgatgttctccaacgaatttagtctgccttatttaacgaaagtcagaccggaaacgaccgccgcgatggcaagaatcatcggtcagttaatgagtgaaatccgcgtaccgtttggggtaaacgtgttgtgggaccctgtggcctcgtttgatttggcgatggcgaccgacgcaaaatttatccgcgaaattttcaccggcgcttacgccagcgattttggcgtctgggatacgaatgtcggcgaaaccattcgccatcagcatcgcatcggcgcaggccacgtgaaaacgttgtttaacatcgttccggaagcggcggtgtatctgggaaaccgcgatgtctgttcaattgcgaaatcgaccgtatttaacaataaccccgatgccctgtgcgtctcggggctgacggcgggcgctcgcacggatagcgccatactgaagcgagtaaaagagaccgtccccgacacggtcgtgctggcgaataccggggtgtgtctggaaaacgtcgaggagcagctctgcattgccgacggatgcgtaacggcaaccacgtttaaaaaagacggcgtcttcgccaactttgtcgaccaggcgcgcgtggcgaagtttatggagaaagtacgccatatccgacaataaaatggggataagcaaaacgcttatcccctgcagagagcgataactcttctgccgatctccgtcgccttcgccaaaagacacgccggggatcggttccagagtaacccgaaccggcaaggagtcaacgatcgatgattaatgatgttaagtgggttcaggcgcaacgccatgccagcgactggcgacacgcgctggatatcgccgttcgtccgctgattacgttcggcgcggcggccccctgctacctggacggtattattgagaacacccttaaatgggggccatattatcttatcgcgccggggattgcgctgccccatgccagaccagagcaaggcgccaaccataatcaaatcagcgtcactacgctatcaacgccggtcgctttcggcaatgcggattgcgatcccatctggctgttgctttgcgccagcgccacggatgccgaagcacatattcgcaccattcaacgcatcagccagtggctcgactcgccggaaagcgtcgcgatgttgcaagatgcgccaaatgatgccgcgcttttcgcgcaattaaccgcattgcgctgatggaggttccgatgatcctgcacccttcactggcctccgccgatccgctgcgctatgccgaggcgttgaccgctttacacgatgcgcctctcggctcgctgcatctggatatcgaagataccagtttcatcaataatattaccttcggtatgaaaaccattcaggcggtcgcacaatacactcgccatccgctctcatttcacctgatggtctcatcgccgcaacgctggttaccctggcttgcagctatccgccccggctggattttcattcatgccgaaagcgtgcaaaaccccccggagattctggcggatattcgcgctatcggggcgaaagcaggactggcgcttaacccggcaacgccgctattgccttatcgttatctggcattgcaactggatgcgctgatgatcatgaccagcgaacccgacggacgcggacagcaatttatcgccgcgatgtgtgaaaaagtgagccagggcagagagcatttccctgctgcggaatgctgggcggacggcggtattacacttcgcgccgcacggctgcttgccgccgcaggcgcacagcatctggtgattggccgggcgttattcacgacggcgaactatgatgtgacgttgtcacaattcaccgcgctataaaggagtcatatgctgatgagccaacagcgccccgaccgtatcaaacagatgttgcattacctttggcaacacaggcacctctcaacacagcaagctattgagctttttggctatgcagaggcaaccgtgcgccgggattttcactatattgccagccgttatcccggtatggttcgcggccatggttgtattgacttcgacgacagtacggaagataaagaatatgttttcgacgttaagcgaacgttacaaagcgaggcgaaacgcgaaatcgccgccctcgcccgcacgttcatcaaggatggagactgcttttttctcgactccggctccacctgtctggaactggcaaaatgtctggtcgacgccaaagtaaaagtcatttgcaatgacatcaaaatcgctaatgaactgggtggcttcccacacgtagagagttacattatcggcggactgattcgccccggttacttttcggtgggcgagagtctggcgctggagatgattaacgcctttgccgttgaacgcgcctttatctcctgcgatgcgctgtcgattgaaacgggcatcaccaacgctaccatgtttgaagtgggcgttaaaacgcgcattattcagcgctcacgcgaggtcatattgatggccgatcactcaaagtttgatactgtagaaccccatgcggtggcgacgctgtcctgtattactaccattcttagcgacagtgcgctcccgtctgctatcgcccgacgttatcagcaggcgggatgccgtctcatcatgtcagacccctcatcaggagcgcgttaatggacatcaggcaaatgaacagaacccatctggatcactggcgcggattgcgaaaacagctctggcctggtcacccggatgacgcccatctggcggacggcgaagaaattctgcaagccgatcatctggtatcatttattgcgatggcagacggggtggcgattggctttgcggatgcctcaatccgccacgattatgtcaatggctgtgacagttcgcccgtggttttccttgaaggtatttttgttctcccctcattccgtcaacgcggcgtagcgaaacaattgattgcagcggtgcaacgatggggaacgaataaagggtgtcgggaaatggcctccgatacctcgccggaaaatacaatttcccagaaagttcatcaggcgttaggatttgaggaaacagagcgcgtcattttctaccgaaagcgttgttgagggaaatcatacaggaaaaggtcgggtatagtacccgacctttatattactggggcagatctttttcagttaacaagcgtgtcgttttcacttgttcaatatttctggcgccacccaacatcatgttaattgtcagctctttgtttagctgttcaatcactgatgccacaccctgagcgccgccaagattaagaccgtataatacaggccggccaaccgccacaatatccgccccgctggctaacgctttgaatatgtgcgaaccacggcgtactccactgtcaaaaataacaggcactcgcttgttgacgacttttgcaatcgcaggaagcatatcgaatgaggacggcccgctgtctaattgacggccaccatggttagaaacccatattcctgcggccccggcctggatagcaatttcagcatcctccggcgactgaatgccttttacgataaccggcagaccggaaatacgatgtacataggcaatatcctccggcgtaaaggcttgtttagcctgcgcgtaaatttcacttatccctgctcctttgccagtttttgaaccatcgtcattttttctggcgaacatttccaggtttgcaaagcccaacgggaactggaagttatttttaatatcttcttcccgataaccaccgacaggcgaatctacggtcagaataatcgctttagcgccatgctttaccgcttgtgcaagaataaattcgttaaattgattattcttactcatataaagctggaagaagaacggatttttcccggaaacgttagccacctcttcgatggtcttgttgccataggtgctcaacgagaaaatcgaaccgacctgcgccatgcctttcgccgtcgccaactctccggaggcgtgggccaggccctgcgccgccatcggtgcctggattataggcgttttaagcggaatacccagtagctgcgttgataaatcgatctcttttaactcaatgccctgtaatacgcgcggcataatatattttttgtcaaagctttcggtgttgctgcgaaggttattctcatcttcggctccaccgcgaatataaccaaatgcccctttctccattttggcctgaacgcgcgcttccagggaggctacgttcgtcatttttattgctttttcgtccgtactggctttgtactcttcagcataagccaggcctgatgttgccaacattgccagcgaggccactacccgaatgaggtgatgagttttcatcattattccctttattgcttaaccgcttctgcctggatttttatatcgacaactttcgtcatccccatatcgaccagataatctatcccccactgggtgcgatctatttgcgtgacaaaatcaccaccgcaaacctgcgccttgaatatcgggctcatataacagccaaacttggtggtggttaaggtgacgggcttcgttactcccttcattgttagcaaaccgtcaatagaaaccggtttattatcttcaaaatgccattttgttgatttaaataccatttctggatatttttccgcatccagaatatcgctactgcggatatggttatcaaacgcatccaccccggtatttaaggcgcttacgggaatcgtcacacgcatctctgcgacttgcttttccggctgatatttcagttcgccgctaatagcataaaacccgccatgattggttgaggtctggaaatgatcgatattaaataccgcattggtatgcgtattatcaaatttatatacatctgcatgagcagcacttaataaacccagagacaggagagcaccaagaaaactctttttcattatattcactttatatcttaaataaggtgaagctatcttaatgtcccctgtacgcaggatcgagagggataaacaggaaggactgttgcaaaaatagaacgatgaaaaggccgtgtcacaaaaacagcagctcacgaatgagtttatgtcagggctatttccgcaacctgtaccgcctttgtggcggtacagaaggcaaactgactaacgcatgatacgatcgtcgacataacggcgcttatccggcgcgggcgggaaatactgatacagccaggtttcgctgatagcctccccctggcagcgcaggaacatacgcatatccaccggtgccgtagaatccgaggtcggataccagtcaaactggatacgataaccgtcgaaaggctcaacgtagaggatctcaatctgcttcgcctcaccgctggagagcgtaattaccggctcaatgccttttggcgcggccgctttcagatcgccgccgacaaaatcaatagcaaaacggcgcgcccatttatccgggtaatgttcgcccggcgcccaaccttcgggaaagccgcccatccctgtacgggtcgccatgacccgcgcaagcggcgattgtaccggcggctgcgcgctccagtacaaacgataattgaacgccagcgtatccccggctttgatcgctttttccggctgccagaaacagaccacattatccagagtttcgccagtggttgggatctccatcaggctaaccgcgcctttcccccacttattgcgcggctccacccacaggctcggacgtttgttgtaccaccccatcacatcctgataatgcgagaaatcgcgatcgagttgcagcaggccgaaccctttcgggttatcgtccatatatgcattgaactgcaatttctgcggattattcagcgggcggcaaatccactcgccgttaccccgccacatcgccagccgatcggaatcgtgaatttgtggatgaatggtgtcgcatacccggcgttcattattcccacagctaaacatactggtcatcggcgcaatgccaagttgcttaatatctttacgggcgtagagatggttttctacatccatgatcacctgcgatttttcgcaatgaatcacaaatttatacgcgcccgtcacgctggcgctgtccagcagagcgtaaacggtaaacgtagtatcgcccggcttcgcggtgtcaaaccagaatgcggtgaagtcagggaactcttcctgaccgtcagtataggtatctatcgccagcccgcgagccgacaggccatactgataagtatcatctaccgcccggaaataactggcgcccaggaaggagacgacatcgcgccgcgccagttccggcgctttaaagacacggaaaccggcgaaaccgagatcgctctgcccttccagttgcgtcgtatcgacgccggcatcgttgtatttaaacagttccgggcgaaaatgaatctcgcgagcaagatgcgtcgtcgtatcaacggaaaacatgcgtacgcgacgacgaaagcccatccctacgtggaaaaactgaatatcgagctgccggttggcaacaccgttccagagtgaatgcgccgcgtcatactgaatgctgttataggcctgcggcgtcagattggcgagcgtatccggcaagggtcccggcgcgccaccccagggctttttcgctaacgcctgggccattgattgcagaccagcaaaatcaaaacggacaattttaccatccgcaatatcggattccgcggcaaacgccgcctgagaaaagagggaagcaataccgctggaaccgcacacggcggccattgccattgaacctttaataaatcgtctacgattcatacctgaaaatgagtccttctggtcttgtgaatggtcccgcgctggttttttcagcagcaagaatgtgcccgtttctgaccgctcactctagacaaaattcattaataatccaattgttggtcgcctggaaactgtgcaaaagcgtaaatattttatgtcgataagaaccgaccgaatcggatgtaaacctcacgcagcattcttcaggttatgaaaagtttattccagactaacgtgatgtttcatgactcgtttaaacagcgccagacgcgcacgcataaagcggttttccactttaaaaccggcaagtttgttcagcccaatccgcaacagacgatctcgcccccgaatgctggcgggccagcgaaccgggccgtgcagcacgtcgcgcgtgcggctggcatgacgagcgaaattcacccagtaatccgccacctgcgaggcaaaggccaggtcattctcattcacataatggcatgtgggctcagcccgcgttaacgtatcgaatacatacggtatttcattgccatgacaggcaccattcgcgtaggtgttatgctccgcttcggcgacataatcaaaccagtaacgccagcacggttcgccgatccgctgctgcgcttgcatgacgacataacccaacgtggtaaataccatatcccgacagacctgccgccctagcgcttcgtcgcctttcactccaggataaagcagccggattaaccccaggccaacacgccgctcacggcgcattttttgaatttgaccggcaatatcgacgccaaaaacggccaatacgctggcttcatcgctattcgagccgatcatcaccggtatcggatgctgtttcgccgcaaagaaggtttccagcatcggatgcggcagcacgacgtcgccggaaatcggcgtcggcgcaattttaaaaggcgcgtccagcggccaaaacgtctctgccggtaaagcgcgtagctgttcggcagtggcatgggctaaaccaagatgttccgccagcgcaacgcctttttttagcgccacctcgcggggcgtatccggcagcgtataaccactctgaataatcgctttatgaaaaagccccttcgccaacggcgaagccatcaacgacagcacgctgcgggcgccggcggattcgccaaataacgtcacattctgcgtatcgccgccaaacgcggcaatattgtcctgcacccagcgcagcgcagcgatttgatcgagtaaagcaaaattatgaatacactccgcctcttcgccttccagcgccggatgcgcgaaaaagcccagatggccaagccgataattgaccgtcaccacgatcgcgccgcgcttcgccagcgcttgaccgtcatagggcggcaaactccccgcgccaatggtataaccgccgccgtgtagccagaccatgaccggcaacggttcatgacgcacggcgggagcccagacgttcagatagagacagtcttcggaaaaatttcccggatcgccgccgccgagttcgcgacaccaggtaatatcctgccaactggcgcaggagaaacaatccgcctggcgcacgtcgtgccagggcgtaacaggctgcggcgcacgccagcgtagctcccctgttggcggcgcggcataaggtataccgcgccagatatggatttcttcctgtacgacgcccacgattttaccgtgacgcgtctccaccaacgggatggagggattcaacataacgccttccttttacagtatcctcacagcctgtgaagcttaccgcttttaaagcagaccgcaacggcgtttactgcgttcttccgcttcctgatataacgaaaattcatcccgtactgcacatcccagcgcctgttcaaaggcgtcgcggctggcattgccgtggcttctggccagcgtttcatctcccaaattcgactgaaaaatgccggctgcgctgaccggaagaaaatcttcataggtaatcggctgcgcgattacccaaccgcgctcaataagcggctgcggatcgtcgccaggatggatcgcctgacgatgcgcctcgccggaaggcgttaagcgatagcggaaccaggcaagcccctgctggcgaagcagaaattcgctatccggaaaggcgttaaagacctcccgcaaatggagttgatgcgtgaagttatccttacccgttcccgccttgtgcaacagttcgtcatataatcgacgaccttttggcgtcagcgcgacgccacgttgctcaatttcgccgaagcgcgccgtgtgcgtaccctgcttttcatcaacgaagagcacctgctcttccagagctttgaaactggtttgccgcaacagaataggcacttcgcggcgaggcggaccttcgataagaattttaggcgtaatgccgcactccggcatcatggcctgtacccggtcgatatccagagtacgcggcgtcagatggttaatgtggcatcccggaaaacagaccacgtcggcaattaaacgatgctcacgatgcaggctgcggtacgtttcttcatcaacggtagcctgacgatgccagcgaaaagtctccagcgtttcacggacgaactcttcggcctgagcagcgctaaaaccgccctgctcgtcgtactcatccagcaattgtcggcagcgcgatgtaaaaatatcacgctgcgataagatttccgccgcccgctggcgtaatgccgcgttttcaatgagctccaggcgtaatagcgaagtgaacatgcgaaagggattacgcgagagcgaagcctcgtcaatgggacgaaatgccgtggagtgcacaggcacgcccgcctgagagagatcgtaataacttactgggtacatccccatgatggcgaatatccgacgcaaggtagaaagttcttctgcggtgccaacacgaatggcgccatgtcgttccacgttcaatcgcgccagttcatcggcattagccaactgctcatgcagtttgggattattttccagcaccgccagattcacgtcagccacaagttccagtaacgtaccgtactgcggaacttcctgctggtacattgccgacattgcctgcgaaaagtgttcccgaatctcatctgccgtgatggtgttcgccataatgtcatgcctccagtgaatgttacctggagtgtagaaaacctcatccattccggggagaagaatttataaagtgtgatccgacctgaattcattatgcagaacggattgacatgagctggcatatccccgaccagatcgcggcttaacacgcttaacggcagttgaatcatcagtaaaataaaacagttgtaacttgaaatggtaaaatgttaataatattttgctatcaggttatcaaaaacaaacaactttacttgtcacccgcacggctctgtttttaacatcgcttatggaaaaaaatggtctgtttagtcagcgcattcggttgcgccaccttcatacatttgtcgccgttgcgcaacagggaactctggggcgcgcggctgaaactcttaacctgagccagccagcgctttctaaaacgctgaacgaactggaacaactcaccggaacccgtctgtttgaacgcgggcgactgggcgcgcaattaacggttcctggcgaacaatttttgactcatgcggtaaaagtattagatgcattgaataccgccgggcaggcgctgaatcgcaaagaggacgctagcgccgatgtggtgcgtgttggcgcgctccccaccgctgcgctgggtatactcccggcggctattgggcggttccatcaacagcaaaaatcgacctcgttacaggtcgcgaccatgaacaatacgatgttgcttgcgggtcttaaatcaggcgagatcgatctgggtattggccgcatgtcagacccggaattaatgggcggtttaaattacgaactgctgtttttagaatcgcttaaattagtggtacgccccggtcatcccctgttacaggagacgatcacgctcagccgggttatggaatggccggtagtcgtctcgccaaaaggcacggtaccgcgccagaatgcggaagccctgttgcaaagccaggggtgtaaaatgcctgccggatgtatcgaaacgctatccgcatcgttatcacgacaactgaccgtagattacgattacgtctggttcgtcccctctggcgcggttaaagaagatcttcgccaggcgacgctggtctcattacccgtgccgacccagagcgcgggcgagccgataggtattcttacgcgagttgatatcccgctctcaaccggggcgcaaatgctgattgcggcgatccgtaaatcgatgccgctgtgatagcggctgtcggagaataaacgcgcccgcggctaaaatagcccgctggcgcgacgcttactaaaggaaggatgatcgcatcgtcgcgccagtatcatgtaaacgaaacgcatcaacggcttgcgtcaagcgggcagcctgttcttcaagcgaagctgccgccgcggacgcctcttcgaccagcgacgcgttttgttgcgtaaccctgtccatctcagaaatagcctgactgacctgaacaataccgcgactttgctcatcagaggctgccgcgatgtcgagcataatatcggtgacgcgtttgacggcatccacaatctcattcatggtgctccccgcagcgataacctcttcagatccttgttcaatcaggctgaccgatgcgccgatcaagccttcaatctcttttgccgcctgcgcgctgcgactggcgagggtacgaacctcactggcgaccaccgcaaaaccgcgtccttgttccccggcgcgtgccgcctcgaccgccgcgttcagcgccaggatgttggtctggaaagcgatactgttaatgacggcggtaatttccgagatttttttcgagctggtggaaatattccccatcgtttgtacgaccccggaaaccatctggcctccgcggctggctttaccggaagcatcttccgccagtttgctggcgtgatgcgcattatccgcattctgcttaacggttgccgtcaactgttccatactggccgcggtctgttcaatggcggcagcctgctgttcagtacgagaagataaatccgtattaccagcggtaatttcgctggtgcctcgataaatttcctccgccccctgacgcaccgcccctaccgtttgttgcaacgcatgctgcatctgctgaagatgatggctcaggcgaccaatttcactgcgtcctgtgggctcgtcagccatggtcagatcgccggccgcaatgcgttcgatacgtgacgcagactgctgcaagggttgtatcaccgtgcgacgcagcaccatgaaggtcattaacgtcaataccagcgccaacgtaaatgcgccaatcataaacatcataccgagccgggtacgttggtaagcctgctcgctaagtagtctcgcccgctcggtgcgcagttcaatcgctttcaacaggacatggttatatgcggcatccagttgttttgcctgctcgttttcatgattaatgatcgcttcgaacatgccatttttggcaaatttcagcatcggttgcaggccgttgatataggcggtgtagcgggcgtttaactcgttatctaacgcgtcatcggcgggtgttttcaccgctctggacatataagcgttaaagccgtcctgagactgcttgatccgcgtttccgcagcggcaatattggctttcatttcatccatttcagcaatccggctcgccgcgccagcgtggatcatattgatacgtgcggtacgtaagtggttagcgctgttggataatcccatccgtacctgaatctcgtccgtgacatcacgctgatcgcgatcggcctgtaacagaaaatagcctgccagcccggcgctcaaagcaaaaagaagaaggatgccaccgagaatggaggaaaacagcggaaccagccgaatatgatgcaggaagcccagtttatgcgaggcttgcatcgagaatgtgttgcccatgaccgtcgactctcttgtaggttttatgcgtaaaacacgcccgttagatagtcatcggcacttcgtgacgtttgcttatcgcgaaaagcatcgccttcgtcacattttcacaacattcattccagaaaattcagaaaagcgccagcggaaaatccgctggcggatgaatcagttatcgccaaagtggataacagtacggatggatttaccctgatgcatcagttcaaaggcatcgttaatctgctccagcggcaggcggtgagtaataaaaggatctaaacggattttaccgttcatcgcatcttcgaccatccctggcagctgcgtgcgccctttcacgccgccaaaggcggagccacgccagacgcgaccggtcactagctggaagggacgggttttgatttcctgccctgcccccgctacgccaataataatgctttcgccccagcctttatgacaacattccagcgctgctcgcatcacgttaacgttgccgatacattcaaaactgaaatctacgccgccatcagtaagctcaacaataacgtcctggatcggtttgtcgtaatcattcggattaataaagtccgtggcccccatttcgcccgccagcgtaaatttttccggattcgtgtcgacagctaaaatacgcccggctttagcctgaaccgcgccctgaataaccgccagcccaataccgcctaaaccaaaaacggcaacggtgtcgcccgctttcactttagcggtgttatggacggcgccaataccagtcgtcacgccacagcccaacagacacactttatccagcggcgcctgcgggttcactttcgccagagaaatttccgcgcaaacggtatattcgctgaacgtgctggttcccatatagtgataaacgggttcgccgttataagaaaagcgggtagtgccatccggcatcagcccttttccctgagtggcgcgtacggcctgacaaaggttagttttaccggacttacagaacttacactcgccgcattccgccgtatacagtggaataacatgatcgccgggtttcaggctggtgaccccctcgccgacctcgactaccacgccgccgccttcgtgacccaggactgccgggaatacgccttccggatcatcgccggaaagggtaaaagcatcggtatggcaaacgccggtatgagtgattttgaccagaacttcgccttttttcggcggcgcaacgtcaatctcgacaatttttaacggctgaccgggaccaaaagcaactgctgcacgtgatttcatatatctcttcctgttacggtgagggaaattgttattttagataagcgcgaagaagatggccgatttccgccatccgaaccgcgcgctgatctggcgtagtctccccgctgaccagctcatctttcagatggatttcaaccatttcactcatcaggccattagacgcgccgcgcacggcggcaatctgttgcagaatcgccagacaaggttcgccagactcaagcgcccgctccagcgcttcgacctgcccgcgtatgcgacgaacacgggtaaggatacgttttttatcttcaggtgaatgcggcattcgacctccatatactataggggggtatactatcagaattttatgtttatgtaattgtaaaattacgcacaatataaaaatcaatagcttatagatttccggcatagaccatcaagaatcagttcacattcagcatattcagctcatgggaactttttcaggccacagacaataaacaccaaagctttctttctaagctgcaatgttctgcccgactggggcacagaggtaatgccggtaaatccagtcccattacccagaagtaaatatttgcttaatagtttttatttactcaccaggtggtaatgaataaaggttatgatatgcagatgtcagtcttgtaagaacgtaacatcacaactgcgatacaccgccgacgggtagcgaaaatatctcaaccctgtgtctttccaggcttagtcaatgtggacaaaaaatcaaatgagcgttatttgaaagatttttaatacccaaaagcgtcatcattattgttagtttgaaatcaatctcaggtaataatccatgcctatttcgatttgtaaacatggtgctccttttgttgttcaacatgaaaatcggtacggttccggtgcaagtcagtcatcatcactttcaaaatcaatccgccatattagcaactctcatgaggaaataaaatttataagttgctatagtgcaaatggagcctgtttttccaatgcacagatgctagccaatgcctcagggaggcctgttataggttactatgggaaaataaataagttaacagccagtctggataatagcggtcgtatattccgcccacagcataagcttgcggccaatatttgttatgtaggtaatcggcttctgagcgctccagttcaacttgggtttggcctgaaacatctgctaacctgtcactcaaatggtaatgtcagataaagtgtcatgccatgtccttcccggcattgctattccacagcctacagatatgggcgctcagttctttcctcaatcgttgctatgggaagttctgccgtcatttcacgctcttgccaaccagcattttattaaagcctgacttttaccagagtaatttcataagagtgcccatcttctggtctaaaaataataaatctattgttatttttagtaaaggatttcgacaaaataaaactatcatgatatctggccaggacgtagtaccagcctccatcatacaatatcatttcgtattctttctttaattgtggtttatagatcccaacaaaaaaagaaaatataaaaaaatatataataaaaccaagcataactatagtgaaacaatgccttcgcacccaactgagttgcgtaaaacaaatcactggcatcaatttactataaaaacgcatccccaccgataagcataaagctaccagtaaaatgataaaaaaaagctcccacaaaaacgattctgttaagagagaaaactcgataacaattggaataaagaacaaaaccgctgccaaaaaaagacgtaaaaagctaatgtcgtggatacgtgctttttgctttactagaaaaaataatagaatacccactccccacgctattatgaatatagccatcaggctaatcgcatggaatagacttcgggcaatgttgtcagggccgacgcctacataccaccacgggaaaccatagtacgcggagacgccccagccataaaaataggcgcttccccatcccaaaccacctaaataggccaaaagcatcgaagagtttttaataattgaatcatcattcattatagttaactcacttaagaaatatttaatatgaaaatagaaatcaaaatgtcacataaaacactagcactttagcaataatagtcggatgataagtttgtctgtttttcctgagtatcaagccagctcatactcacgccagcacactaaaatcaggagtggcttcttttttagatctttgccttagccaggcgcacactcaataatgatagcagtcagataatatgtaccaggcattaacctcacgttgttgatgatatatttacttcgttgaaaaacaataaacattgtatgtattttattggcgacgaaaaactgttaaagaagcgtaattccatatacaccatttacctgattacttttcttgctaatatttgctaattaattatttgctaaagcgtgtttaataaagtaaggaggacactatgccattgagtgttggacagggttatttcacatcatctatcagttctgaaaaatttaatgcgataaaagaaagcgcacgccttccggaattaagtttatgggagaaaatcaaagcatatttctttaccacccaccatgcagaggcgctcgaatgtatctttaatctttaccaccatcaggaactgaatctaacaccggtacaggttcgcggagcctacatcaaacttcgagccttagcgtctcagggatgtaaagaacagtttattatagaatcacaggaacacgccgataagttgattattaaagatgataatggtgaaaatattttgtctattgaggttgaatgtcatccggaagcttttggtcttgcaaaagaaatcaataaatcacatcccaagcccaaaaatatttctttgggtgatattaccagactggtattttttggcgacagcttgtctgactccttagggcgtatgtttgaaaaaacacatcatatcttaccctcctatggtcaatactttggcggaaggtttactaatggatttacctggactgagtttttatcatctccacacttcttaggtaaagagatgcttaattttgctgaagggggaagtacatcggcaagctattcctgctttaattgcatcggtgactttgtatcaaatacggacagacaagtcgcatcttacaccccttctcaccaggacctggcgatatttttattgggggctaatgactatatgacactacacaaagataatgtaataatggtcgttgagcaacaaattgatgatattgaaaaaataatttccggtggagttaataatgttctggtcatggggattcccgatttgtctttaacaccttatggcaaacattctgatgaaaaaagaaagcttaaggatgaaagcatcgctcacaatgccctgttaaaaactaatgttgaagaattaaaagaaaaatacccccagcataaaatatgctattacgagactgccgatgcatttaaggtgataatggaggcggccagtaatattggttatgatacggaaaacccttatactcaccacggctatgtacatgttcccggggctaaagaccctcagctagatatatgtccgcaatacgtcttcaacgaccttgtccatccaacccaggaagtccatcattgttttgccataatgttagaaagttttatagctcatcattattccactgaataaagttccatcggctgcggtacgccttgagcaaaacacagctcaatatcatagtgccggtggcatgaaaatatgatgctatctttgctgccgattggtcaataagtgatacatagtctatgttcagtaagacaaaaatggatagagtcgataaatcgccaccgtaactaaaatactcactatcacactgacaataaagtatgttttgaatggctgcttttgcgttttatgacggaagagttgttgaccaacaatcgccccaggccacccaccgacaaccccaaacaccaacaaagtggattccggcactctgcgccaggttttacgtgccgccgttttgtctataccgtagatcgccagcgttagcacattggcgagcaggaaccacatcgcgacgggatgcgatgtaaaaatgcttccgaccgcagcgaagatcaggagtaaataacaaaagcggttaagatacatatcattatgtcatagcaataattaggggcatcggagcccattatacgcgatacatgcgcctatgtgatgtagaatttttttcactcagccaacgagtcattaaggattcatttttaattaccatggtaatcataaggtaattaacggctgtgaacacgattaaaatgggtaaagccaccgaaaatgttaccaccttaaccgttgccaggataacttaatgaagaaccctctttattgctgtttgttatccggttggcagtctcagttttggatttattaatcgtatttatatttattacataagatgtacgatgttaatttgagaattttatctcaacaaccgtatatattcagatatttctgaattaagattatcatcgattaaaacaagttaacgttttgataaacataacaacatcgtcagaaatcatgatttgttgtcgtttgttcatgagacaaataatttatatgcttgcaaatatagatagcacgcaaatcaacttagctcaaaaaatgtatttgacaagaaaagataagtctttatattggccctggatagagtggtaagatgataattagagacatgaaaggcaccgtcactgaagcatttatctgcttatcatgtaaatatgtatgcgtaaatggagcataaactatgtccagtatactaatgtctatggtatctttacattttcacctttcatggtgtcgctgcactcatatccagttgatatcttatggtatattcaatccattccctttgatgattcctgtcaaacctcctgattaaattagttaacagcgatggaatacataacgttaagtactttacgcctgcaaatgtcaggctcacgccctaatgcttaatttataatacgcattaccttactacaggaaatagatagcatgttatccaaaaaatttggcttatcgatgatagtgttgggaataatgtcgtcttcagcgtttgctgatagcatcgttgaagggagaacactcaatgtcgcagtatcaccagcctctccccctatgttatttaaaagtgctgatggcaaattgcaggggatagatctggagcttttttcgtcttactgtcagtcacggcattgtaagctaaacatcaccgaatatgcctgggatggaatgcttggcgcagtggcgagtggtcaggcagatgtagcattttcgggaatttcaatcacagataaacgtaagaaagttattgatttctctgaaccttattacatcaactctttttatctggtcagtatggccaatcataaaataacgctcaataacctcaatgaattaaataaatattctattggataccctcgaggaatggcttactccgaccttatcaaaaacgatctggagcccaaaggatactactcgttaagtaaagtaaaattgtatccaacctataatgagacgatggctgatctaaaaaatggcaatcttgatctggcttttatagaagagccggtttattttaccttcaaaaataagaaaaagatgccgatagaaagccgttatgttttcaagaatgttgatcagcttggcattgcctttaagaaaggctctcccgtgcgcgatgatttcaacttatggcttaaagagcaagggccacaaaaaatatctggcattgtcgatagctggatgaaatagtaagctatgtcatcaggtaatatgctggctatcttttatttcctattggaagggattggtaatacgctgcttgtaacatttacctgttttctctcagcgtttttgaccgggcttacagtcgccgtattacggcgactatcccctcttccactacagaagatactcgacgtactggtctttattcttcggggaattccaatacttattgctgtttttcttgtttattttggattgccatcgattggcatatatgtttcaccactggtggccatgaacctcagcgtcggcttaatcagcgggagttatcttgccgaggtgttcagaggggcgcttaaattagttgagccattcgaaataacggtagcgaaagtggcaggaatgcgtcaattacaggttataataaatattgaactgccacagatgttgcgattttctgtgcccggtattatcaatgagttttcttctgtattaaaagcgacgccctttgcttatactgtaggcatcgctgaaataacgaagcaggcaatgtcactgacagccatcacgctgaacgggttacagatttatactcttgccggggtattatatttcattatttataaagtatttactcttctggccggagtgtttgagaaaaaatatcgcatcagttgaaccataaaaatagaggtgatactcatggctttactgaaactaaaagagataagtaaggaatattcaggaaaaaaggttcttgatacggttagtctgaaaattcaatcgggagacatgaaagtagtcatggggccatcaggttgtggaaaaacgacgcttttacgctgtctgcttcgattagaagaacctgattatggcaatatttattttcacgggaaaaatatttacgacaaagaatttactattcttgagttcagaaaaaaagttggttgtgtcttccagaattacgctttgtatcgccatcttaacgtcatggataatattacccttgccctatgtaaagtgtttggcatgccgggacaactagcccgggagaaagccttacatgagctacaaaaacttgatatggcctcgcatagcgcgaaatacccttcgcaattatcgggcggccagcaacagcgcgtcgccctggcccgaacaatggtcaccgacccagaactcattatttttgatgagccgacgtctgcgcttgatccgctcatgactcgtgaagtcggaatgttgatcaagcaacttcacgacaatggcgtcactatattatgcgtcactcatgatattcgcctcgccagattactaagcgataacgtaacgtttcttaatcatggcaaaattcgtgcagaaggcgcttttaccgatcttgccttacgagaaacggatccagatatccactgtttttttagcgaggcacaacgatgatcgctggctggtctctcttctttaatgacctgactgaacaactgccacttgttgtggacggtattaaagaaacctgtaaacttgcgctgattgtttccatcaccggttttttgtggggaattattattttctttctgagcctgagccatcgccccgtggtaaaagccataactcgactgtacatggatttctttatcggtacgccactcattcttattctatttgttatctattatggtttacctcaatctggcattcacctgtcctcttttaccgtggcggttacaggttttaccttgaatgtcggcgcatataatgccgcgtacatgacaacggcctataacgcattgaataagtatgaaacggaggcagcagtcgttcaggggttgaacaaacggcaggtctttttgtggattatactgcctcaggtattgctgtcttccattccagccttaacgaatcaggtgattaataaccttaaagacagcaccatcgtttttcttatccaatatactgagtttttcgcgcgaattcaggaggttgctgcaaccagctttaaattcttccatgcttacctttttgccgccatagtgtatcttattggcgttacctttatcgtcggtttgacccggtttttagagcatagactgcttcgccattacggtcagggttactgagttgtactgcactattctgattaattcaccactgacattatcaaagttatttttatttagcgttgattaagattttaaccttcattattgcgttagatgtccattctggtctaagtcttactccattgaggatattatggcgctaccacaactatcaatatggcagcccggcgatgggttaagaaaaataaagtataaatatcatgtttgtctcattgtcatattctccgtccttatacggttgctgtttttaactgaccgctacctttggtgtgacgaagcgtccagcgtgctgattagtcgacatagcgtagataatctgctcttccatgccgcttttgacgtgcatcctccgctttattatctgttactgcatgactggatgatattatggggtgatagcattgcagcggtacgctctctcagtctactctttgggatcctgacagttgtgctggttatcgcgcttacgcgatggctggcaaatgaacgtacagccttattggcgggatggttcgccgccctgatgccgatggcagtccattacagtcaagaaacgcgcatgtacgcgttaatgggaatgctaacgctcgctgccgcgttagcattgatgatgtggataaaaacacccacccataatcgctatcttgtcgcgtatgctttacttatgacgttcagcttttacacccattatttcaccctatttacacttattgcccactggatcgcagtaacaatattatcctgccaaagccataaaacggcctgctaccttaaacttcctggctggtggtttgctaacctggcgattgctgtcgcttatctcccctggttgcccgtattgtttaatttactgactcatctggcgcagttgagagccggtaatgatatcggttggattccccccgtaacatggcgtgacctgcctgcgatgtactggcatttttttaccggaaacaacggacagggttttccgtcgttcattctgtggctggctgtaggaggttttatcggtactgtggggcgaatatctttatgcaacggagaatatgaaagatatcagctgatattattttgtaatctggtcatccctgtaatgctggtcttcatcatttcctggtggatgccgttatttatcgatcgttatttcttcttctcatcgctgagcactgagagatcccctcataatttccccaaagcgtaaccatgtgtgaataaattttgagctagtagggttgcagccacgagtaagtcttcccttgttattgtgtagccagaatgccgcaaaacttccatgcctaagcgaactgttgagagtacgtttcgatttctgactgtgttagcctggaagtgcttgtcccaaccttgtttctgagcatgaacgcccgcaagccaacatgttagttgaagcatcagggcgattagcagcatgatatcaaaacgctctgagctgctcgttcggctatggcgtaggcctagtccgtaggcaggacttttcaagtctcggaaggtttcttcaatctgcattcgcttcgaatagatattaacaagttgtttgggtgttcgaatttcaacaggtaagttagttgctagaacccatggctcctttgccgacgctgagtagattttaggtgacgggtggtgacaatgagtccgtgtcgagcgctgattttttcggcctttagagcgagatttatacaatagaatttggcatgagattggattgcttttagtcagcctcttatagcctaaagtctttgagtgactagatgacatatcatgtaagttgctgataggtttccagttttccgctcctaggtctgcatattgtacttttcctcttactcgacttaaccagtaccaacccagcttctcaacggatttataccatggcactttaaagccagcatcactgacaatgagcggtgtggtgttactcggtagaatgctcgcaaggtcggctagaaattggtcatgagctttctttgaacattgctctgaaagcgggaacgctttctcataaagagtaacagaacgaccgtgtagtgcgactgaagctcgcaataccataagtcgtttttgctcacgaatatcagaccagtcaacaagtacaatgggcatcgtattgcccgaacagataaagctagcatgccaacggtatacagcgagtcgctctttgtggaggtgacgattacctaacaatcggtcgattcgtttgatgttatgttttgttctcgctttggttggcaggttacggccaagttcggtaagagtgagagttttacagtcaagtaatgcgtggcaagccaacgttaagctgttgagtcgttttaagtgtaattcggggcagaattggtaaagagagtcgtgtaaaatatcgagttcgcacatcttgttgtctgattattgatttttcgcgaaaccatttgatcatatgacaagatgtgtatccaccttaacttaatgatttttaccaaaatcattaggggattcatcagcacttaacgagcatgagcttgatcagcttgataatatcatcgagcgcaaaaagcccattcagaaagggcaaactctgtttaaagcaggtgatgaactgaaatcgctctatgctatccgctccggaacgattaagagctacaccattaccgagcaaggcgatgagcagattactggattccatttagcaggcgacctggtgggttttgacgccattggcagcggtcatcatccgagctttgcacaggcgctggaaacctcaatggtatgtgaaatcccctttgagacgctggatgacctgtccggcaaaatgcctaacctgcgtcagcaaatgatgcgtctgatgagcggtgaaattaaaggcgatcaggatatgatcctgttattgtcgaagaaaaacgccgaagaacgtctggccgcgtttatttacaacctgtcccgccgctttgcgcagcgtggtttttcaccgcgtgaattccgcctgacgatgacccgtggcgatatcggcaactatctgggcttaacggtcgaaaccattagccgtctgctggggcgtttccagaaaagcggtatgctggcggtgaaaggtaagtatattactattgaaaacagcgatgcgctggcggccctcgccggtcatacccgcaacgtcgcttaaacgtcagctaaaccattgatgttatcttctgccatatcgttaaatttttctcatttattgatctggcagaagcgcttcctctgtttcattcaccatatttgagttactctttagttacaaactgcgatgacagttgtaaggagaccctgtatggctatgtatcaaaatatgctggtggtcatcgatcccaatcaggacgaccaacccgcattacggcgagcagtttatttgcatcaacggattggcggcaaaattaaagctttcctgcctatttacgatttctcgtatgagatgaccaccctgctttctcctgacgaacgcaccgcaatgcgtcagggcgtaataagtcaacgcacagcctggatacgtgagcaggcgaaatattatcttgaagccggtgtccccattgaaattaaagtggtctggcacaatcgtccctttgaggccatcatccaggaggttatcgccggcagtcacgatctggtgttaaaaatggcgcatcagcacgatcgactggaagcggtcatttttacccctaccgactggcatttgctgcgtaaatgcccaagccccgtgtggatggtcaaagatcagccgtggccagagggcggcaaagccctggtcgccgtgaacctggcaagcgaagagccctatcacaatgctctcaacgaaaagctggtaaaagagaccttacaattggcggagcaggttaatcataccgaagtgcacctggtcggcgcctaccccgttacgccaatcaatatcgccattgagctgccggaatttgatcccagcgtgtataacgacgccatcagaggccagcatttactggcgatgaaagcgctgcgccagaaattcagcatcgatgaaaaagttacgcatgtagaaaaaggcttgcctgaagaagttatcccggatcttgccgaacacctccaggcggggatcgttgtgcttggcaccgttggacgtaccggactctcagccgcgtttctggggaacacggccgaacaggtcattgaccatctgcgctgcgacctgttagtcattaagcctgatgagtatcaaacaccggttgaactggacgacgaggacgattaatccctcttgcgtcctgccggatggcgctgccatccggccaataccctattcctgttactcatctccgccgaggaaatagatccccaaaggaatcgccagcagaatagtgaacaccagactgtaaacgaaaatcattgccgactgaatggcatacatagagcttgtccactcggacagtggaatatgatactgctcaatcacaccgccgatagtcgcgcgcgttaccaccgatgccgcaacgataaacactgccagcaggcataacagaaattttttccccttcgccgatttcagcttcatcatgatcatagtattgtcctttacagatgacttttttacctgatagcaacaataccatgacaatcgcgcgatgtctgctctataaaacgtgacattgtatttacataaaaagtaaaccgctgagattaaagctgatagcactatttcttctttttacttatcgatgatctacgcgtttatcctgggtaaaatacctgttaatcaggtcattctgagctgttatcgtaggaaggagcggaaaacaataatgttcactgaattttttctcaaaaacgcatttaatctggcgatacttttcagttgcggtatggcgttgctggtcgtgagattttggctcagccgtaacgtacagtggaagaaaggattcacgttccatgcggcacagttttttatttatgcaattattattgggaccatcgggagcatcctgaataatgctattgaagattataatttgcgttttatctcttccggggtcattgattttatctgcacctcgctcattgcgcttattctgacgataaaacttttcctgattattaaccaatttgaaaaagcacaggtcaataaaggtagagatgtcaccagtacccgtattctggcacgggtcataaaaataaccattattgtcgcgattgtcttactgtatggcgaacattttggcatgagtctgtccggtctgctgacctttggcggtatcggcggtatcgctgttggtatggcgggcaaagatgtcctgagcaattttttctccggtattatgctctatttcgatcgccccttcagtatcggagactggattcgttctcctgacagaaatatcgaaggtacggtcgccgaaatcggctggcgaattacgcgaattaacacattcgaccaccgcccgttgtacgtgcctaattccgtcttttcatccattagcgttgagaatccgggacggatgaccaaccgtcgaataaaaacggttattgggttacgttacgaagatgccgacaaaattggcctcattgttgacgctatcagaaacatgttgcaggcgcacagagatatcgatcagaaacagacgctgttggtctattttaatgaattcgccgactcttcgctgaatattatggtgtattgctttaccaaaacaacagtatggcaggaatggcttgccgtacagcaggatgtttacctgaaaattattgcgattgtccaggaaaacggcgctgacttcgccttcccaagccagacgctctatatcgatgacccggaggccgcgcctgcgacaaaataaaagatagccggtgcccgataagtgttatcgggcaccgaggcttccctgtccggatggcgggttgttagcgccttccttacggtgatcaacggctcttttcattcaccgtcatggtaaattcaagcacctcattagtgtcgttaacgtaggcatgaggcatgtcggttctggctacagcggagcagccctcccgaataataaagcgtctaccgtcgactgttaatgtcagtgttccctgattaacaaacagtaattcacaggtgtctgccggatgccctgccgattcaaactgttcaccaggatgcattatccattgccagagttccagcatatccggcccgctggttcccgccatcagttttgcgctgccgcctttctcgccgcgccacaacaccggaatagcatcccggtcgataagatggaccatcggctcgctggcgacgttgacaacatccgccacggacactcccattgccgccgcgatcttacataacagcgcaatgcttggattggctttacagccttcaatttccaccagcattcctttactgacgccggaacgccgcgcaagctcatccagcgacatctttttttggctacgaaattgtttgatacgttgggaaacagcttcatttattgtgctgacgtcggcgcccgccgtggtcgataagttgacttttttggtcattggtcgatatcatagaataaaatagtcattacaggattatgcgatgtcttctatgttaccgtcaatcagcccggaactggcccgtatcgctcccggctttcgtgcattaagtattaatgttattgccgctccgattcgcgatgcgcaggtcggagaaatcgcgctaaaagaggcctgtcaggccgtaattaacggccaaccggcgtgggcacaggcgcatatagacgcctggaatacggtgcttaaagcattcggcgcaaaaccaaagcgcaccccctgctcggctgaagcgctacgaaaacgcgtgttgaaggatggaacaatggcggcgctggatccggtcgttgatctttataacgcggtgagcctgcgctatgccgtaccggtaggcggcgaaaatagcgcggcttattgtggatcgccgcggctggttttcgcagacggtagtgaaacatttgatactctgaaagaaggacagcccgccaccgagtcgccagaaccgggcgaagttatctggcgcgatgacagaggcgtcacctgtcggcgctggaactggcgtcagggagtacgtacccgactaagcgcttcagataaagcgatgtggtttatccttgaaagcttgccggaaatgccggttgatgaattgtacgcggcaggaaacatgctgactgacggccttgaaaaaatgatgccaggtttacgttttgaatccacgttgataggtgtttgattgatattgcgtaacaggagaaataccatgtcgctgtttctgacaagttttattttcgaaaaaaaagagtacgacgaagagttttatcaactggatggctgaattgagcgctatacgcagtctgttgatggctatattgggatggaaagctataccgatgccgccagcggaagaatagttaacaattattactggcagacccgcgaatcaatggagctattgataaataatttacagcaccagcaggccaaatcacaaagtcataagtggctttccggttaccagacgattattgcagaaattcaggggtgccataacgttaacctgccccatccgctggcatcattttcagttccttatgcgtaatgcaatagtatatatattaaatgtgagggcacacaagagaatgcctgcgcccctgcattgccggttattcggttctctgtgcaggggcggtgctgatataagtgattagtaaacaggaagatgagtgatatctcgtggtacactaacacgcgtaaccacattgttttcatcgcactctatcaacgctctggcaaaaatactgagctcattaattttcagcccggaattatccaaaaactggcggcaagcgtagtcagaaacaaaaattatgccgggatgaatatcatgttcccgaataaaacgggcctgagcaaatggcgtatccatactcagcacatataccgcccgggttgagtggctacccgctgatttaaggcggtcactatagtcttttacctgccattcacaaactggcgtatccagtgacggaacgacaataatctgcttttttatccccgggatacagtaacccggtaataaattatggctcaccagcccctttgtgcagggtaatggttcgccttcagccagtataccgggtttgagggtcagttgcgttttgccaaaggtgacagcgtgttcctgacccaatgagatataatcctgtgttgttgttggcgtcataaaaacttctccttttaacatttgtattattttagccataataattatttagcaatccgctaaaaaaccaggtgaacatccataataagatgatggtgataaaaagaattatattagacataataattaatatagttttatagtcttcctctgatggaaatttctttcgtgaaactcattgcatatttaaaagatatgtcaatacgttcattactatgcccacgataggttataacttgtgtatatttacctggaacattttctttcttaagagggccataatcccataagccttttaaattttcacgcgctacagtcttattaatgtgaacttcatttacaggattcccgtcgatatccttaacaatagttgtgatggtggcactttcacccggcgataatacagacttatctatactcataactgttaaatctgggcttggcgtattagatatagtttctgtttcaatatactggaactcagataccgatggcacaggcgtgtaccctgacgctgaagccatatccgtttcattataaatttctagtttaatctttgaaccccgatgttccttttggatattaaatttatgctcacatggcttttctcgtttaagtatatgctgagagttatctttattgatctgataatacgtacatactgtagtaaaagtttccgcagactgatagttattatccggatctctgatgcctacatttctggcattcctcgcaatagtcattcccggaaaaggtgtatacttttcaataaaaaagccaagtccattaaactgcaattcgtagctatcgcgaggtgttccaggcctgtgcccaacgctcggcgccgtaggaggagaaaacatcccgacggttgccgcggacgttgtcgacgaatccgccaagacgcttatcggcgcagccgccagaagcaggctatagataataagattatgtttcgacatacgcactgttgatcctttttaaaacattaattcgcatcagaggttgcggtattacccttagcatttcccttatcagaaataattctgacgcggatatatttattctgaagcgattccccattaagactataaggaagaagccaggtggcctttgtcgcacccggtacggattgccaggatttcatttcatccgagatttcccactgataattaaacgcatcagtacagtccgtgttatttacacaaagcgttctggctcgcatttctgttccgacgactggcgcagtaacgcttccgttggcctcttcagtacccggcgtaaaaagcacctccacagaagtgaccttctgcgcaatactgtctgactgcgcttgtagtagtacggtacccttcaccggatgtttatcgtctggtccgcttgcttcaatatgtaatttgagcgagcgggcatcatcgccgatatgggtcaccagaacccgttcaacccaatggccgtcacgctctgtaccaccgagcgctttaaatgccagacccggcgtatctgattgatacttaatatgacgtggtttgagcgacgcccactcctcttcagaacgctcgcgcacgtagtgccactcaataaccttcccctcttctccggcaggaagcggcgtattgatgacaaagttgccgtcctcaacctgaacatcgtcattgataacatttatccaggaacggaaactggtctcatcctgtgtcacccttaccgggatacgctcggaggtcacgcgagtaccccggctgtcagtcaccgttaaataaaggctatactcctgaccgtcggtcgccgtcagcggaagttgtggaaggataaggccgctgcccagactcccctgaagctggagtccggcgagaagctccgcatcacccgaccactcaaccttctcaaccgggtaacggctatctaccgtcgccattaatgtcaccagcgtcccggacaggcctgacaccggcattgccgtaatgcggattttgctggcctgctcccgatacgccatgacgatatcgtaattacgatcaacaaaggcacgccggttagtcgtattcgacggcgccccaacgttgcggtaatcaagctgttcatgtaacggcgtaccgaaggaataattgactctcagaccgccctctgcctgcgagccgccgttaccggcgtcccgatatcctgctctgacctcaagcaaggggacaggattccagaccagagccgcacctgcggcgcggggattccggcttaatgtaccgttacccaatagatcaactttatccccgtaatactgttcatatgtcagctctccactgaaccagggaaaatcggggagcgtgccttttgttcgcagatcaaagccatatgccggacgctcatcatgtaattcatgcgctgctgacattttccagccggtgagagggaaataatagttgccggaaaaggccagactgtctttatagacttccccgccaatgccgccacgcaagtgggaataacggatgtcggcatccagaaacgtattgacgccgagcagccatccattgacctcctggcggtaacccataccaacgttaacataggtgcggccatcgaaactgctgttgtcgtggtcgcgaaagccaagctgaccaaagagtaaagacgatgttgtttcctggacgggaataaacatatcgaactctgatgagcgatatttcgcgccatcttcaagattgacgccaccacggaaaataatctccggaaaagcgctctttatcccctcgttcaccagatgattagcggcctgccctggtaacgcctttatttttcctttggcataatcctccagcgtcccctcctgcagatgcggagaaatagacgatgccgtccccgcaatccacgactgaatttcattatcgctatcagcaatgaccggcagtggaatctgactggtaacaatggcccaggttatatatttagtaatgggttttttagaaaaaaccactgtattgtctcctgctatatccccctgcctggcagagggagtatttaaataagatgtttatttggcgataaccatcagcgacggatagcgcgtttattctccggcgtggctttcgtcgttttaggcgtaacgtggacacggaacagtttattctgctcagttcccttaataatatatttatgcttttcagcgttggtattattcagatcggtgaacttatctggtgtcccggcatccgccatctgccaggtaaagttataattactgacctcacactcagccgccgctgtggcggcacattccagtaccgcttcaagggtgccgcctaccactggagtgttggcgtcattggtaccgttgagttcatcagtcggtttaccactttcattcaccacattgatagtgacagaacgtagcttattagaaattgtaccgtctgcggcggagtcgccgctcaccccagaagatgcagaagttaataagacagtggcaggcaagaatgcactatccggcgtccccgttgccgtcttaatccggtaaacgattttaatttttttaccgcctgcatcagcaggaatggtaaaagccgtcccggttgccgccggggttccagaaggatcggcggcctcattatccaccagataccatttaatatcgtcggcattattcattttatccagcgataagggatccccatcctcatccctaataaaaacatccgctatctggagggttgaaccggtcgtcagttccccagacacttctattttttttgcattagtagttgccacaggacggtgaccaacagaagcaggtgtagcagaagaagccatatcattggctctggtattcgccaccgcctctactgagaccacggatgcacaaattgctaacgttaataaagatcttttgaagtacaaaacaattcccttttattaaatcattagaaataattacgagatttataatctcacgggctaaaaattcagggttattcaatcattttaaccgcctgtgaaattatgcccttcgccatgctaattacttagctttactggcaaaatccgatctccaagtgtaaagtttattcagaaacgtcaagcaatttaaatctttcttgttttgccagaaaagctaacaaccccccactggtttaataacacagtatatcaaacaccttaaatgtttatattttcggcttcaataaagaggaatgatgatgaaaaaagccataataatctcagtattagagcaaatagaaaaaaatcttgaagagaggattgatattgaaaagctggttgttataacaggttattcgcgaaggagtttgcaggatttttttaaagaaaagtgtggcgtctctatcggaaaatatatcagacaacgcaagttgagcagaagcgccactctgctaaagctgacctctcagtcggtcacagatatcgcgttcagaatggggtttgattcagtgcagtcctatagtcgagagttcaaaaaaacatttggcgtcaatcccaataactatcgcaaggctgatttctgggatctcagaaacctacggcctccctactggcttgactgtgatgagcattatcagttcgaaatttgtcagcttacgtcaaaagaaattttcggatttcaaacgtctcatcagatcgcaacaaatgaccttcctaaaaaagcgtcgcctataaaatggaaaatcattcatgagacgctcagaacgtggggcgaaaatgtgtattgtctctcgtcttttaagccggataataccaaagaccaggtcatcgccgtaagcagtttttttggtatggaacataattccgtcgatggaggaaaaatacccatgtcgagggtaataaaatgtggtaaatatgcaaaattccattttgttggtcataaggaacaatatcaacaattttccaatacaatatatatgtgtatattaccaaaactgaatcttatcaggagagaaggagaagatattgaatacttccatttggcatccgtccaaaagcaacagaataatgaatccattgtcgatctttattattacatccctgtactgtaatgacttcgtaccatccacgcatttcatctgaaaagtcttctcttttcagaacggtaataaaactctcagtattgattctggtaaaataagtgactattaatatagttaacgttttgaaagaattgaaaaaaataaattgcgtgcacgcgacaccggagacagattactgacagtactgtacggtgtagtgatcaggtaatattggctacagtttacggtaaaagcaaagtccatactttaactattaatgggagtatgctggccgggcggcttgcggggccttcatgctcccacatttacaatgttggtatgattacattctctctatactttactgtgctaaccttttatctcgttgagataacgtttaattaaaatgctctctttttgatgtacattataagaggagacattattcatattttcgaaatcagggcagacgatatgtatacaaccatcagaaacacagcgctagcaatggtagcttgtttttcgtatatcgcacatgccagtacccaccctcctcttattatcaccaggggagccggaggagacgcctccggagccacagtcattcatgataattggcggcatggcactcctgacctggtcaatcttaccgatatccccatagataaaatcagaccagaaaaatacagttgcatactgattattgggcaaggagctataaaagagatgcttcttgcgaacaatgcctcagcaatactttccggaaaaacggttggtctgtatagtcatctgatcgatcagaacacgctcagattacttcggcaattgcagaacaaagtgagattcaatctattttttacccgctcgcagataactctactaaaactaaggaatatttcagaatataattttttgagttctaaagtaaataatgtctggggacaagactcactagcaattgaaacagtggcacctgacaggggtaatataccggaaaaagcgcttcccctcaaaacaacagattatgtgatctggctgggtggaaactatactacttcctctggtacgcagcgtatcttcacaaacgatcagattgttgtagccctgaaaccactacataatgttatttcatcaaatgcatcgattgctattatgctttcaccacgtttttttgataatagcgtgagtaaagaagcaaaagttaaacgactgaaggcagtgcttaacaccttttcgcgaaacagggtcacattttatatgagtaaggagatgcttgctaatctgaaagaatttgatttgccagttcaactatccccttcttacgcagagctgatgcgaatgccctgggccagcgctacccggcattttgcctctgtggatcaatataacctgtttgctgatctcatacctaaagttacgccgtttcttcttgaaccgaatgatgccgatcaagctctctatgcgacggattatcttaatacccggcgtgtaagtctgacccaaaatattcttaaccacggttgtgactaaataaaacgcgcagaatccgggatagttagcaatccaaaacagaccgttagccatgagtactgtttatcttcactatacagggaacaaccaaataactgacaacacaaatcaagccgagacccggaattcggctatacaggcgctctattcaattcaggcccagaaacagtccggtacccatactggacacggcctcccaactgctttagcgcattaccagtccagcttcgatgcgccttctgtcgtctgcactatttcactggttttcataacgcgatgataaccataaacatcagcgtatttcgtcattccggttgcggtgtcaacctccggcttaccctgcgtttcaataatctctcccgtccgggtcgtcatggtataggtcgttgtacatccggctagcatcaacactgataagctaagtaccgtaataagactacatttttgcatttctcgtttccctggcacctctatttttgatgtactttaccgaataccgcaacggcaagatggatgattagggctattgctccctgtttgtccgtatctgactggctcaggttttttgatgcgctgcgttaatccggcagtaatcgctccagcacatccccagccagaagcacgctctcctgaagacgctccaggccataccccgctcgcgccttggcggaaagccccgccattagcgtccccataaagtccgtcgtccggtcagcctcttgcggataccgcatggcgacataagtgcgaatcaggttttcagcagcgatgtaaaactcgcaggcggcctctcgtgccggtttatcgttacaatgagcgccctccagaaccagacacccagtggcatcaggatcggcagcgtaacgtcttgccgcttccatcagcacatcgataaggcacttcgcggtcgggcgatcgtgacgcagaagcgccccgagcggaatcgcgtcggtcatcctgtaacgctttaatacgcgagtatacagccccaacttgctaccaaacgccgcatagaaactgggaggattgatcccgaacgcttttgtcagatccgctacgctcaccgcgtcgtagccgcgcgaatgaaataaatgttgagcggtttcaatggcttgctccggatcgaactggcgagggcgacccggcgttcggctatgttttgtagtcattactacataactccttgacggcatgatttcattacgcatattgtagtggctactacaatatcataaaggacatcctgatgacgctatttcgcaacaaatctgtactggttttagggggaagtcgtggtatcggcgcggctattgtacgacgctttagcgctgacggcgcatcggtcgttttcagctacgccggatcgcgtgaagccgccgaaaaactggcaacggaaaccggaagcatcgccatccagacggatagcgccgatcgtgatgccgtcatcagcctcgtgcgtgagtacggaccgctggatattctggtcgtcaatgcgggcgtcgctctcttcggcgatgcgctggaacaagatagcgatgcgatagatcgtttgttccgtattaatatccatgcgccttaccatgcgtcagtcgaagcagcccgcaacatgccggaaggtggacgcattattattatcggttccgtgaatggcgatcggatgcccgtaccgggaatggccgcgtacgccgccagtaaatcagccctgcaagggctggcgcgcggcctggcccgtgattttggcccccgcgggattacgataaatgtggtgcagccaggcccgattgataccgacatcaatccggaagatggccccatgaaagagctgatgcacagtttcatggcgatcaaacgacacggaagacctgaagaagtggctggaatggtggcatggcttgccggtccggaagcctctttcgtcaccggcgcgatgcacaccatcgatggtgccttcggcgcctgacggccaggcgaatatcacacggttgccgtctacgctccggcaaccgtgttagaagctgttcatgcgagaaaacatccgcaagcgccgggatcaatcgtggattttaacgccaagacaaccgcgaacaaattcaggattaaaatgcttcaccgcttcgccaacgtagcctaaatcaagggcgttgatttgagccatttcgttatccgttagtgagaaatcccagatagcaaagttctcttcaatacgttcctgtcgagtggatttaggaataaccgtgacgccacgctgcacgttccaacgcaggacaacctgcgcgatggttttttgatgggcatcggcaatcccttgaagcatgacattttcatacggtttatgtctcccgccgcctaacggcgcccacgcttcaggctgaacgttataatgcttcatggtttccagcgcggcgggttgtgcaaagtatggatgcaattcgacctggtttaccattggcgtaattctgacggtttcacagaagttggctaacacatgcgcatagaagttggacacgccaatggcttttagtttaccggcttcataagcgtcctccagcgcgcgccacgcgctaaaataatcacccattgcctgatgcaataaatagagatcaaaataatctaacccggattttttcagcgacgcttcaatacctgctttggccagatcgtagttagccatatcttgcacccacagtttagaagtaataaataactcctcacgggtacacagacctgtcgcgatggcttcacgaacagcgtcaccaacggcatcttcattgccgtataccgcagcggtatcgataagacgataaccgctgcgaatagcgcttaacactgactgctgacattcttctttgtcggttaccttaaaaacgccaaaaccaaccataggcattttaaggttgttacttaatattgaatattccacgctaaagcaccctttcgtcgtaaagacgccatgataagagcaaaatacaggtacaatgagtattgttaaatacgattatatttatacaaaaagttcattaataacagttgtacagattttttattgcatctaaacgttcagtgcttgctatatcctcgccgtgtagcacctgtttgataatgacttttcttatgcgtcaaaaccagtaccgtcattttgaccgtctgtgaaaaagttttctgaacaggcaatgcgatatccggaataatatttttagcgaagaggcgccggctggctcagcgccgttttgcaccagtcataaaaagcgcgtaccgcaggcggcagaaacctgttttgcggatagaccagcgcaagcggcaaatcataagaatggttgtccatgcaggtcaccagcgccccgctgtgcagatacggcgcaaccagatagctggcgacgcgaattaaccccagtccctgtattccggcctgaatataagcgtccgtatcatcgacaaccagcgtctcctgcacccgtatcgcgtaatccttcccttcacgcgtaaaaaaccagtcgatggtacgcccggtgcggtggttcaggtagccgaccgcatggtgcttttgcagatcatctaaattttcagggctaccgtaacgctcaatgtaagtgggcgatgctgctatcacccagttaaagctggcaagtggacgggcaaccagcgtggtggaatcatcgatcctgccggcccgaatcacgcagtcatacccttgaaggataatatcctccacgctatcgctggaacaaagtatcagctccagctccggatactggcgcaaaaaggccgggagcgtgggaataatgcaatgtcgggcgagagattgcggcatccccactttaaaacgccctttgggttgtgccgcccggccgggaaatgacgactccatggccgcgatatctgccagcactcttttgcactcttcgtagtaacgccgcccctctgcggtcacactaagtttgcgagttgtacgttgcaaaagttgaatcttaagccaggattccagttctttaaccactcgcgataccgttgagcgcggcacgcccagcacttcggcggctctgataaaactatgggtatccactacgcaaacatagacctgcatcgcttccagcttgtccattttccccccgccaattatcccatttatcagaacagtctaacccgtcttcggcgtcttatcgaacgcagatccctgacgtaatctctatctacaggtgaatcaacacagagaggcgcaaatgaaacaatccaataatcaggtgggtgaaaaagtattggtgctgggcgcgggacaactgggggcgtcagtgctggcgtcgttggttccggcggtcacacagcgtaatggttccgttagcgttattgtgtcagggcgatccagggataaacagagcaaacgacgttccagcattcatcaacaactggcagatgccggtgcgcggtttatcccggtcgacatcgcaggcagttcggttgcagcgttaaaagatcaattccacggttttgatacgatcatcaattgtatggggtttgtcgccggtgcgggtacccagataaaaatcacccgcgcggtactggaggcgggcgttaagcgctatttcccctggcagtttggcgtgaattacgatgtggtcggcaaaggcagtggccagccggtgtgggacgaacagtatgacgtcaggacgcttttgcgcgagcaaaacgtcacagagtgggtgattgtttcaactggtatatttacctcttttctcttcgaaccagcctttggtgtggtcaacttagccaaaaaaaccatcaatgccctcggcggatgggaaatgcaggtcaccgtcacgtcgcctgcggatattggtcgcctgaccactgaaatttatctgcatcagccgcgtatcactaacgaagtcgtctttgtcgcgggggaaacgacctcttatgcaaaactggcggaaacggtcgaacgcgtgacgcagcaaacttttacccgaggcgtattgacgctacctgacttacaggagcaactccgtttacatccgcatgacccaatgctgcgctatcgcgtcgccttcgcgcgtggtgacggtatgtggtggccgatgagtgacacctggaatgcacaacatcatctgccgacacaggatattgccgcctggctgaaaacacagcaatgagaacggcggcatcaggcgctcgcttaatccccatgccttctgccagcatcaggcggcgggcgtggctaccttgcgttaacaagaaaccagtacgcatcagtgcttcacgatatacattgtacggctataggccacatcttccgggttagtaatggggtatccctttacccacggtttaattaaccggccattggtatactgataaataggcgctataggcgcttgttccgttaaaattttctccgctgcattgtaatccgcgttacgcgcttcggcagtattttccatcgtcgcttgcgtcaggattttgtcataagtcggattagtaaagcgtgaaatattccccgtatgcgtggacgttaataaggataagaaagtcgacggttcgttgtaatcacccacccaggaggcgcgaataacatcaaaattaccggtattccggctgtcgatatacgttttccactcctggttttgcaatttcacatccacccccagatttttcttccacattgacgccaccgcaatcgcgattttctgatggttttctgaggtattgtaaagcagggttaatttaagcggcttctgcgatccgtagcctgctgcacgcagcaatgttttcgcctgggcattaagttcttcctggctcatttgttcaaacggtgaaggatcgggcgtaaatcctgccgtgacatccggtgtaaaatgccaggccggtttttcaccggtacctaagactttttccgccatcaaacggcgatcaatggtcatacttagcgccagacgaacgcgggaatccgccgtcggccctttctgcgtattaaacgcataataataagtccctaattgcggcggtgtataaacttgccctggaatatccttcaataatttctggtacatatttttagggaaagattcggtgatatcaatatcaccggcaaggtaacgtttcgtcgcagccgattcctggttaatgggtaaaaatgttactttttgcagtaccgttttcgcgttatcccagtaatgcgtattaggcacgaccaccagtttttcatttaccacgcgctctttaagaacatacgcgccattgccaatcagttttcccggcttcatccagtctttgccgctttcaacattcgctttttggaccggataaaaggcaaaactggcggtcagactggcaaaccagggcaacggcttgtcaagctgaacacgcaaagtgtgcgcgtccacggcactgacgccaagctgatccggcgtgactttaccgtcgataatggcttgtgcattagtgatgccagccagagcggcaaaccaggcgaagggggaaagcgttttgggatcaacgaggcgttgccagctatagacaaaatcctgggcggtcaccggcgttccatcggcccattgcgcatcatcccgcaacgtaaacgtccagatacgattatcattgctcttccactggctggcgacgccagggataatttcacccttttcgttctggttaaccagcccttcaaacagatcgcggatcacctgaatttcaggcagcccaacggctttcgctggatctaacgaagcgggctcatctttgatatgacgcaccagttcttgtttttctgccagtaccgttccgccgggaacatccgcagcatatgccagggaaaagctgctaaccaacagcgcacaacaggttactgaaacagaatgcctcatagaagttcctcaaagatgagttaaatgacaacgtaattatttgtttcagcagaaagaaatgcaattatcttccgccagaaagttgatatcgcgccatacaagagggtaaatagaaaccatttgataatcggcgggttttacacaacactacgatgattaccctactggtctcagcttcgggaaacgcgtatgactgtcacccgcccccgtgccgagcgcggcgcatttccgccaggcactgaacattatggacgttcgctactaggcgcgccgctaatctggtttccggcgcctgccgtcaatcgcgaaagcggcctgatactggctggcacccacggggatgaaacctcatccgtggtgacgctctcctgtgcgttacgcaccttaaatccaacccttcgccgtcatcatgtcgtacttgccgttaatcctgatggctgtcaactggggttaagggcaaatgcgaatggcattgatctaaaccgtaactttcccgccgccaactggaaagcgggtgagacagtttatcgctggaatagccgcgcgcaagagcgtgatgtcgtgctgctaaccggcgaccatcccggctcagaaccggaaacccaggcgctttgccagttaattcatcgactccaacccgcctgggtcgtctcttttcacgatccgctagcctgcattgaagatccacgtcgcagcgagctaggcgagtggctggccgatgcgtttgcgttgccgctggtgaccagcgtaggttacgaaacgcccggttcgtttggcagctggtgcgccgacctcaacctgcactgcattaccgccgagtttccccctgtttccgccgatgaagccagcgaaaaatacttgctggcgatgtcgaatctgctccgctggcatcctaaagatggagttgacccgtcgtaaagcgtagcgcgggctcaacatcaaccgccagccatgttgggccatcaagatcggcgaagctcacctgcggcataagcggcagcgcggcgctaatcgctcttgatgtacagagcatacagcccagcatcaggccgaatccttgctcccgcgcctccgttgccagcgccagcgcctcggtcagaccgccggttttatccagcttaatgttgatcatatcgtagcgccccgtcagggctttcagactactgcgagtatggcagctctcatctgcacagatgggcaacggatgaataaaattttccagggcggcgtcatcctgcgcgggcagcggttgctccagcatcgcgacattcagatccgccagtaactggcaacgcgccgccagcccctccggacgccacgattcattggcgtccacaatgagcgtcgcctccggcaccgccgagcggatcgccaccatacgttcgctaatcaaacgagcatcgagtttaattttcagcaacgtcgcccctttttcccatagtgccgccgcactggctgccatctgttccggcgtgcctatcactaccgtttgcgcggtagtaaaaaccggggccagcgtcacgccgagcagcccggcaaggctttgctgccgctggcgggcttgcaaatcccataaggcgctatccaccgcgttgcgcgccgcgcctgccggcaacagtttctgcaatgcttcgcgagtcagcccgttttccaactgaggcacaatactcatgatttgcgccatgaccgaggcatcactttcaccataacgtggatatggcgtacattccccgatgcctttcacgtcctcttcttccagttcgacaacgacaacatgcgcttcgcttcggctaccacgcgcaataacaaaaggcgtatgtaacggccaggtttcctcatataccttaacagatctcatctcttcccctctgatagcgccggacgcggcttgctacaaatagtatttgccgtgttaatgaataatgacttaaactggatttcgacgttaactataagtaaataggaacataattatgtcacagactgtacatttccagggtaacccggtcaccgttgccaacgttattccgcaggctggtagcaaagcacaggcttttactcttgtcgcaaaagatttgtctgacgtttccctcagccaatatgcaggcaaacgcaaagtgctgaatattttcccaagcattgatactggcgtatgcgccgcatcagttcgtaagtttaatcaactggccacagaagtggagaataccgtcgtattgtgcgtttctgctgacctgccttttgcacagtcgcgtttttgcggcgcggaaggcctgagcaacgttattacgctttccactctgcgtaataacgagtttctgaaaaactacggcgtcgaaatcgttgacggcccgctgaaaggtttggcggcgcgcgcagtcatcgtgcttgacgaaaacgacaacgttattttcagccagttggtggatgaaatcacccacgagccggattacgacgccgcgcttaatgtcctgaaggcataagccagcgcctgctggcgctacgtttgtcagtgctacaggcggtgctcttttgtcacaagaaggcctctatccggaggccttcttgttgtctatggaaaacccccagctaggctgggggttccggaaagctttcagctttaagccagttattaaaaccccttttgatttgttaaaacatcttgcggtctggcaactgcaaaagttcaacaagaaatcaaaagggggtcccaatgggggacgaaaagagcttagcgcacacccgatggaactgtaaatatcacatagttttcgcgcccaaataccgaagacaagcgttctatggagagaagcgtagggcagtaggcagcatattaagaaaattgtgtgaatggaaaaacgtacgaattctggaagcagaatgttgtgcagatcatattcacatgcttctggagatcccgccgaagatgagtgtgtcgagtttcatgggatatctgaagggtaaaagtagtctgatgctttacgagcagtttggggatctaaaattcaaatacaggaacagggagttctggtgcagagggtactatgtcgatacggtgggtaagaacacggcgaagatacaggactacataaagcaccagcttgaagaggataaaatgggtgagcaattatcgatcccgtatccgggcagcccgtttacgggccgtaagtaacgaagtttgatgcaaatgtcagatcgtatgcgcctgttagggcgcggctggtaagagagccttataggcgcatctgaaaaacctccggctatgccggaggatatttatttttctactcttcacccttcttctggctcagaccatattcacgcagcttattggcaatcgcggtatgcgatacccccaaccgtttcgccagtttacgcgtactcggatagctacgataaagctgggtcaggacagaacgttcaaaacgactggtaatgtcatccagcgagccttccatcgcatcctcgccgactgccaccgtcgcggcatcgtagtcaggcagcaggatatcctgcggacgcagctcatacccttccagttgcgtcagcgcccggtaaatcgcatttttaagctggcgaacgttacccggccagccgtaacgagtgaggaccgtactcagatcggcagacagtttcggtcgcggaacgccctgttcgtcggcaaaacgcgccacgaacagttcggtcaacggcataatatcctgcggacaatcgcgcaacggcggcaaattaagcgtcagaacgttaagtcgataatagagatcttcgcggaacagtcctttttgcaccagctccaccagatttttctgcgtggcgcagataacacggacatcaacatgaatttcgtgatcttcgccgacgcgacggaacgtaccatcgttgagaaaacgcagcagcttcgcctgcatacgcggcgacatttcgccaatttcatccagcagcaccgaaccgccattcgcctgttcaaagaaaccttttttaccttccggcgcatggccaaatagttcgctttctaccgcatcttccgggatcgaagcgcagttgagcgccagatacggtttcgctgaacgagggcttgcctggtgacaggcataggcgaaaagatctttgccggttcccgtatcgccggtaatcagcagcggcgcgctgagcatcgccagtttgcgcgcctgctcaacgacgtgcttcatctttgcgctcacggcaataatctgactaaacgcgctcagatcctgcgtggacaaattctgtagctgctgccccatacgaatcgtggaacgcaacatcacgaccgccccggtcaacacgtattcgtcattttcgttttgtaaatgtaccggcgtaatctccatcaggaagttttgcccgttgatcacgacatgttcgttatgggagctttgcgggttaccgtccagccagcgctgaaaattgaagccgttgattaattgtgcggcggtatggtgccgcattcgctcctggctctgggcaaaaagttgacaactcgccgggttcgccatctccactttactcttcatatccaatgagagcaccggctccggcaacgcctcaagcagcgcgctcagggccagatgttcacgttcggacggcatccagggaacggtacggacatccgttacgccggaaatacggcggatttcggccatcaggctgctgaagtcggtgaattccagctcagcaaaattaagataaattcgcccaatgggatcaatctcgattccgcgtaaatcaatgctacgtaacaccagtaaatcaagtaattcgcgggtcagaccaagtcggtcttcacaaaagacttccagacgcatgggaaccttcacctgaataatgaaccattaaatagatgataagccactattcggctggcaggaaggattctgtcaacaaatattgacagcatggcggaaaaacgggcgctgcggcgtaaagccaggccgtcagcgccatgtgaaaggtcatttctcaggcgacgacttactcttttgcagcgtctcttttagctgaccgataagctgacgacgaaaatcaccgagacgtggtttatcgttatcgatccacggcaatggtcgacatagctccatcgcttttattcccagtcgagcggtaaggagacctgcgccaatcccctgcgccgcacgcgtggacaagcgtgcggccagatcctgagacatccagtccataccgacttcacgcaccagctcactggctcccgcaaacgcgatattcagcaacaccagacggaacagacgaaggcggctgtaataaccaagttcaatgccatacagcgttgcgatgcggttaatcaggcgtaaattacgccaggcaataaacgccatatccaccaacgctaacgggctgacggcgatcatcagagtcgattccgcggcgaaacggctaatctcacgtcgcgcctgcgcgtcaagtaccggctgtaccagattcgcatacaaaccgacgatttccctgtcgttttgcgtttcgtgaatagcggcataccaacgttgtaatgccggatgtgattgatcaatccccgcctgctgcgccagtttttcgcaaaatgcgcgacctttcccgacgctatggctatgtaacagttcacgcgcttcatcgcgttcatgcgcccgctggcgcaagcgccataatcgccgccactccgtgaccaccgatcccacgccagcgccaacgatcagcgcgcctgcggcacagccgcctaaagcgacccagtcctgagtttgccaggcattcattgtccactgtacgccttgcccgaccacgctcgcgccaaacagcgccagtcctcccatcaccattttacgccacaggctgcgtttggggcgcagcgcggcatcgaccgccgcttctgccgcgccttcgtcttccgggcgctcatcgatagctgcaggcgcaaatgtacgcgactccgcttcgctgaaagtttgctgcgctttgaaggccgacgtaggttcctcctttagcggttctgcaaaatcaatacgcggttttaacggttcgctcatcgcagcttatctcctattaaaaactccagcgcagcgtccagacgaatatgcggtaacggtttatcaacatccatcacctgcggacgaaaggcttcgaactgaaaaccctgactatcccaaaacgcttgccccggcaaacgcgaaggcacttcgccggggtacacggttaacggcgcgccgtcactcaaacggtttccacgtaaagccgggattttttcgccgttgacctcaatcacaccgctggtggtcgcctgtaccgacgccagccccaggcaatccatactaatgccttcaaacgcggcattttgccaggcatcctgaataagctgctggagcaaggccaccatattggcatgttggtcgagggtgacatggtcggctttcgtcgcggcgaacagcaatttatcaatcaccggcgaaaacaaacgacgaaacagagtccgctggccatagtgaaaactttgcatcagctgcgttaaggcgagacgcatatcattaaacgcctgcggcccgctattaagcggttgcagacagtcgaccagcacaatctggcgatcaaagcgtagaaaatgatttttgtagaaccctttgaccactttttcgcaatagtagttaaagcgttcgcgcagcattccagcgttggtctgtttatccgcctgcgccagttttgactcgccgaaggcgtccacatccggccacgggaaaaactgcaatgctggcgcgcccgccatatcgcccggcaaaacaaaccgtccaggctgaataaaatgcaatccctgcgatttacactgatgcaaataatccgtccaggcggcggcaatctccgccagccggttttcatcggcgggcgccagcggatcgagcccgtcgcaaagttgccgccattttgcggcccactcagcgcgttgtccttgtaacaagccgttcatctgacgggaccagcttaaataatcctgagccagcatgggcagatcgagtaaccattcccctgggtagtccacaatctccagatacaatgtcgaggtatctttaaaatggcgcagcagcgagtcgttggagcgatagcgcaacgccagccgaatctcactgacgccgcgcgtcggtgtgggccaggcgggaggattgccataaagctgaagtatcccctcgtcgtaggtaaaacggggaataccaaaatcacgttgaggcacacgctttacgccaagcaggcgttcttcgcgtaccgcgctgagcaacggtaagcgcgcgcccgcgtggacattaagcaactggttaaccatcgccgtaataaacgccgttttaccgctgcggctcaacccggttacggcaagacgcaaatgcctgtctaccccacgattgaccagcgcgttgaattcagttttaagtcgcttcattgacatcctgttgagcctgaagagaagaaaaaataataatgagcctgcgttatagatatgtgcaaaaacgttattatcaactacccggagagatcaacaacggcgcattaagcgccgcggttagtatgagtattgagcaatagattatctatttttttactttcggcatatcaagacgactgataccgcccatattcatcgcgtgcgtataccccatatcaagcaacatttgttttgccatgcccgactgtcgcccggagttgcaatataactttaccgtatcgttcctgtctggaactaccgtttcgatatgagatttaatctccttcaatgggatattaatcgcgccctgaatatgctctcgctgatattgttccggaatgcggacatctatccagtattctgcggcataaagcggcatggctatgaataacgctaacgcaaatattccttttttcaacatacttccgtcctgacacgtaatgtatttcgcacacactatacgccagagcttaacgaaatattatgaccagactcgctatttgtaacgctgcgaaattttattcgccgccttacgaagtactggctccagcgcaaacgccagcaacatttttagcggacgacgggcgacggattttaccgcccatcccgccacgccggcaggcccgtagcgtaacgcggtcaacagaaccagcttacctgctattttgaagccgggcttcaccttctgcccggcgcgttgccagcgagtattcatcttcaccttcccgatatatcacttacagttgacggaaacgactacgcagtgtgaacgtatctgacgtgacgtagcgttccatttctcgcaaacgcttttcgcctgcggcaagctctctgtctacggtatccagcagttcgccgctggtcggctgcggtttgcctgcggccagattatccggcatagggtccagtacaaaagacagaacgatataggccactacggtaaaaaacgccagcccaaagaaaatcgacagcacgaccagaatacgcaccagttttaccggtacatcaaggtagtcggcgatcccggcgcaaacgccacgcaccatgcccttttgcggcatacgccatagttttttattcagattgattccacccattagcgctctctccagttcggatgctctgcatcaagaatgtcttccagcgcctgaatgcgctcgcgcatacgttgcgcatcgtctgtgagttgcagtaagcgttgctgctcgctttgcgacagttctccccgaccggcgcggttgctgtaatgcagccacagccaaatcggtaacacaaacaacacaaaaatggttaacgggatggccagaaatagcgcgctcatgcgttctccttacacctaaagctgatgagcgacggcgcgtatcggcgccgccattgtcattattgattatcttgcttcattttggctttcaactgcgccagctgctcgctgatttcatcatcggctttcaggttggcaaactgttggtccagcgattgctgcttaccaaaacgatggctttccgcttccgcttccatttgatcgatacgacgttcaaaggattcaaaccgcgccatggcttcatccagtttgccgctgtcaagctgacgacggacatcgcgggaagaactcgccgcctgatgacgcagcatcagcgcctgctggcgagcgcgtgtttcgctgagtttgttttccagctcgccaatctctttcttcatgcgcgccagcgtgtcatccaccagcgtgacttcctgttcaagcgtagcaattaaatcggtcagcttttgtttttcaatcaatgcggcgcgcgccagatcgtctttatctttgcgcagggccagttccgctttttcctgccactcgatctgctgagccgtagcctgttcaatacgacgggataactgtttcttttccgctaaagctcgcgcggagttcgagcgaacctccaccagcgtatcttccatctcctgaatcatcaggcgcaccagcttctgcggatcttccgctttttccaacaacgcattgatattggcgttcacgatgtcggcaaaacgagaaaaaatacccataattcaatcctcacataatgttctgataacgggcgatgccctgctatgtgattaatacaatttgcgtgccaacttttcataccactgataataaagaaattgtttcgttttacctcgccagcaaaaaaggataaagtggtgaaaaacactaacaagtggcgattttcatcatggctgaatttaaagataacctgctcggcgaggcaaaccgttttcttgaagtactggaacaagtctcccggctcgcgccgctggataagccagtgctgattattggcgaacgcgggacgggtaaagaacttatcgccaatcgactgcattatctctcttcacgctggcaggggccgcttatctcgcttaactgcgcggcgcttaacgaaaatctgctggactccgaactgtttggccatgaagcgggcgcttttaccggggcgcaaaaacgtcatcccggtcgctttgaacgcgccgatggcggcacgctgtttttggatgaactggcgacagcgccgatgctggtacaggaaaagctgctgcgggtgattgaatatggcgagctagagcgcgtcggcggcagccagccgttacaggttaatgtgcgattagtatgcgccactaatgccgatttacccgccatggtgaaggaagggacatttcgtgccgatctgctcgacaggctggcttttgatgttgtacaactgccgccgctgcgcgaacgccagagcgatatcatgctgatggccgagcactttgctattcagatgtgtcgtgagctacgtctgcccttatttcccggttttaccgatcgggcaaaagaaacgttgttgcattacgcctggccaggtaatgtccgcgagctgaaaaacgtagtcgaacgttcagtgtatcgccacggcagtagtgaacaacctttggatgaaattgttatcgatccttttcaacgccatcccgctgaaccgcccgcgcccgccctgccagcggcatccgtcacgcctgacctgccgctcaaattacgtgagtttcaactgcaacaggaaaaagcgctgctgcaacgtagcttacagcaggcgaagtttaaccagaaacgagccgccgatttgctggcgctcacctaccaccagtttcgcgccttgcttaaaaagcatcagctttagctatttctccggctaattgacgacatttacgccagttatccaccgacatttttacgtggcgggccgaagtgcgatacactttgcaaattgaacttcaaaaacttaactattatgcgcctggttttatcgtctctgatcgtgatagcgggtctactaagtagtcaggctacggctgcgactgcgcccgaacaaactgcgagtgcagatattcgcgatagcggctttgtgtattgtgtcagcgggcaggtcaacacctttaatccgcaaaaagcgagcagcggcctcatcgtcgataccctggccgcccagttatatgatcgcctgttggatgtcgatccctatacttatcgtttagtcccagagctggcagaaagctgggaagtgctggataacggggcaacgtaccgttttcacctgcgccgcgacgtttcctttcaaaaaaccgcctggtttacgccgacccgaaaactcaatgctgatgatgtcgtctttacctttcagcggattttcgatcgtcgacatccgtggcataacatcaacggcagtagcttcccctactttgatagcctacagttcgccgacaatgtaaaaagcgtgcgtaagctggacaataacaccgttgagtttcgcctgacgcagccagacgcctcctttttatggcatctggctacacactacgcttccgtcatgtccgctgagtacgccgcgcagcttagccgaaaagatcgtcaggaactgctagaccgccaaccggtcggtaccgggcctttccagctttcggagtaccgtgccgggcagtttattcgtctccagcgccacgatgggttttggcgcggcaaaccgctgatgccgcaagtggtggtggatttaggctccggcggtaccgggcgtttatcgaaattactgaccggtgaatgcgatgttctggcctggcccgccgccagccagctaactattttacgcgacgatccgcgtttacgtctgacgttgcgcccggggatgaatatcgcctatctggcctttaacaccgataagccgccgttgaataatcccgcagtgcgccatgcgctggccttatcgatcaacaaccagcgcctgatgcagtcgatttattacggcacggcggaaaccgcagcctccattttaccgagagcctcatgggcttacgataacgatgccaaaattacggagtacaatccgcaaaaatcgcgcgaacagctaaaagcgctgggcattgagaatcttacgctgcatctctgggtgccgaccagttctcaggcctggaacccaagtccgctaaaaacggcggagcttattcaggcggatatggcgcaggttggcgtaaaagtggtcattgtgccggttgaaggtcgttttcaggaggcgcgcctgatggatatgaatcacgatctgaccttatccggctgggccacggacagcaacgatccggatagctttttcagaccgctgttaagctgtgcggccatcaattcgcaaaccaatttcgcccactggtgtaaccctgaatttgacagcgtgctgcgtaaggcactgtcgtcgcagcagttggcttcgcgcatagaagcgtatgaggaagcgcagaatatcctggagaaagagctgccgatactgccgctggcatcatcactacgcctgcaggcttaccgctacgatattaaagggctggtgttaagcccgttcggcaatgcgtcttttgccggcgtctcccgcgaaaaacacgaagaggtgaaaaaaccatgattatcttcaccctgcgtcggttattgctgttgctggtgacgctcttcttcctgacctttatcggctttagcctgagctattttacgccgcatgcgccgctacaaggcgcatcattatggaatgcctgggttttctggttcaacggtctgctgcactgggactttggcgtgtccagcattaacggccagctgatctccgaacagcttaaagaggtgtttcccgccacgatggagctgtgcattctcgcctttggttttgcgctgatggtcggcatcccggtcgggatgctggcgggcgtgacgcgtagcaaatggccggatcgttttatcagcgcgctggcactattaggtttctcaattccggttttctggctggcgcttctgctcacactgttcttttcgctcacgctggggtggctgccggtatccgggcgatttgacctgctttatgaagttaaaccggttaccggtttcgccatcattgacgcctggatttcagattcgccatggcgtgatgaaatggtgatgagcgccatacggcatatggttttaccggtgctcacgctctccgtcgcgccgaccacagaagtgatccgcctgatgcgaatcagcactattgaggtctacgatcagaactacgttaaagcggcggccacgcgcggcttatcgcgctttacgattttacgccgtcacgtgttgcataatgcgctgccgccggtcattccccgtcttggtctgcagttttcaaccatgttaacgctggcgatgattaccgaaatggttttcagctggcctgggctgggacgatggttaattcacgccattcgtcagcaggactatgccgctatttccgctggcgtgatggtcattgggtcgctggttattgtggtcaatgtgatttccgatattttgggtgctatggctaaccctctgaaacataaggaatggtatgccttacgatagcgtatacagcgaaaagcgcccgccaggcaccctgcgcactgcctggcgtaaattttatagcgacgcgcctgcgatggtgggtctgtatggatgcgccggtctggcgttgctgtgtatttttggcggctggatcgcgccctatggtatcgatcagcaatttctgggctatcagctactgccaccctcctggtcacgctatggcgaagtctccttttttctggggactgacgatctggggcgcgatgtgctgagccgcctgttaagcggcgcggcgcccacggtcggcggcgcgtttatcgtaacgctggcggctacgctatgtggattagtcctcggcgtagtggcaggcgcgacgcacggtttacgctctgccgtgctgaaccatattctggacacgctgctttccatcccttcgctcttgctggcgattatcgtcgtggcatttgccggcccacatctgtcacacgcgatgtttgccgtctggctggccctgttgccgcgaatggtacgttccgtctacagcatggtgcatgatgaactggaaaaagagtacgtcattgccgcccgtctggatggcgcgacaacgctgaatattctgtggttcgccattttaccgaatattaccgccggtctggtcaccgaaattacccgggcgctgtcgatggcgattctggacatcgccgcgctgggatttttagatctcggcgcgcagcttccctctcctgaatggggcgccatgttgggggatgcgctggagctaatctatgtcgcgccgtggaccgttatgctacccggcgcggcgataacgctcagtgttttactggtaaacctgctcggagatgggattcgtcgtgcgattattgcgggggtggaataatgccgttactggatatccgcaatctcaccattgaatttaaaaccagcgaaggttgggtaaaagcggtcgatcgcgtcagtatgacattaagcgaaggtgaaattcgcggcctggtaggtgaatcgggttccggaaagagcttgattgctaaagctatttgcggcgtcgcgaaagacaactggcgagtcactgccgaccgtatgcgttttgatgatatcgatctgctgcgcctctcctcacgtgaacggcgtaagctggtcggacataatgtgtcgatgatcttccaggagccgcagtcgtgccttgatccttccgaacgcgtcggccgccagttaatgcaaaatattcccgcctggacctataaaggccgctggtggcagcgtttaggctggcgtaaacggcgtgcaattgaattactgcaccgggtgggaattaaagatcataaagacgcgatgcgcagttttccctatgaactgaccgatggtgagtgtcagaaagttatgatcgctatcgcgctggcgaatcaaccgcgactcctgatcgctgatgaacccaccaactcaatggaaccaacgacgcaggcgcaaatttttcgcctgctgacccgactgaatcaaaacagtaataccaccattctgttgattagccacgacctgcaaatgctgagtcagtgggctgataaaatcaacgttttatactgcggccagacggtagaaaccgcgccaagtaaagatctggtgacgatgccacatcatccttatacgcaggcgcttatccgcgcgattccggattttggcagcgcgatgccgcataaaagccgtctgaatacgctgccaggcgcgatcccgctactggagcagttaccgataggttgtcgtctggggccacgctgcccttacgcgcaacgagaatgcattatcacgccacgcttaaccggcgcgaaaaatcatctctatgcctgtcattttccgctgaatatggagagagagtgatatggtggaaactctgcttgaagtgcgcaacctgagtaaaacctttcgctaccggacaggatggtttcgtcgccagaccgtcgacgccgtgaaaccattaagctttacgcttcgtgagcgtcagaccctggccattatcggcgaaaacggttccggcaaatccacgctggcgaagatgctggccggcatgattgaacccaccagcggcgagcttcttattgacgatcatcccctgcattacggcgactattcgtttcgaagccaacgtattcgaatgatttttcaggacccctcaacgtcactgaatccacgtcaacgtatttcgcagatccttgacttccccctgcgccttaataccgatctggagccggaacagcggcgcaaacagattgtcgagacgatgcgtatggtggggctattgcccgatcacgtaagctactacccgcatatgctggcgccggggcagaaacagcgtctgggcctggcccgcgcgctgattttacgccctaaagtcattatcgcggacgaagcgctggcttcgcttgatatgtccatgcgctcgcagctcatcaatctgatgcttgaattgcaggaaaagcaaggcatctcctatatctatgtcacgcagcatatcggcatgatgaagcatattagcgatcaggtattagtgatgcatcagggggaagtggttgaacgcggcagcaccgccgatgtgctcgcctctccgctacatgagcttacccgccgtttaatcgcaggccattttggcgaggcgctgaccgctgacgcatggcgaaaggatcgctaagcgaaacaaataccctcagttcgattctctgagggtgttcatgcgactgcccaacagcaatgtttcaacctcttctaacgcaacggaaggaaataacgtgccctgggttgcccaaatgcctgccgtttttaacaccggcaaatagcgtgtgttttcctggccccccaccacgatcttgtcacaataacgccggatatgtttgacaagcagcggaaacgtcattttttcaatttgtgagacaaaaaagctgcgatcaagttttacgccgctaaaacacccgcaaactaatggcgcagcagttgcattccctacgcccaggtcgcccagccataatggattaggttgcttatgaagcgcgtgtattaaaggatcgattaaggcgttatcttgacatgaaaaatgttcagcgacctgcagctccacaaatagcatggcgtgtagtaatgcgcgaatatctttatcctgaaggacaagctgcgccataccccgatcaatatttacgatacagaataggccgtggcgtagaaaccagccatgtttggccgcgattgtccgcaacagatcaagcagaaaacggcgcttctgcgaattgtcccatgacgagataacaaactcaggatgtagcggacgagcgggcgacgatgcaaaatgggtagtgatttcgacacccagtaaatccccctccattgcccttatcggctctgccataaaaaaatagcgcatgtgaccactccacttgatcttaactccctgataatgcgcttttaacgcaaatcaatcaataaaaacgatcaatatataaaaaatgatcgaaaaaaacaatatatgttaacttcatgataacttgctaattttatgttttgagaatgttcttctattgctataaggaaatttacatactacgccgaacaacgctaatacgacggcatgagaccatccgtaaagccaggtttttcttgtcaggcagaggggaaaaatcaaggcgagttaatgttgttacaccattgcgaggcatttcacccactatggcagcgcggcatcgccaaccctagtggcgagttgcatctccgctacaggctgtccagatcccccgaacgacctttaagcgaatagcaactctcaataattgatcggtaaatctgtagcgaatgtgcccccggcgattcgcagaaaagaacggaactaaatgctatttttttaattcatcctttaataccttagccacaagagtcccttcctccggcgcggctagtttaaaacgtcttcctggcgcaggtgtctgttcttcctctccgattaacgcatcaagatccgtaataagtgacttataatattcaacatcttcagtatttccttcggtctcggcccgctttaattttatcatgtgatgggccttaatttgctcttccagttgccttgttgcaagagaaacgcttcgctgttgccgtgattcttgtgataacacgatttgatcgccatccacaaagaaaagaaccccctctttaaccagaatattacctaagatatttatatcatgcatataaacccccgggatttaagaagcgcctccgccattcgatagttatcttcatcttcaacatcgaactcctgaccttgaatatattttgaaactaaaaccgtaacgtctttaccattaatattcatgatggccgaacgagaaaaattcttgtcgtcattggccatattcaaatacttactgacacgatcaggatgacaattacgatgctccggagagttaacatccacttttattccccgctcattaactggaatcttaacaacaaagtcatcatgtaaccgatagactgtcccataacttccgctacctattttatttttttcaatatcacgcatgcgaatatttttctgaaactccggcgagttaataaacgcctctattgccgctggttgtgatgcatccgtctgatcaatagcgccgctctcataaccagacgccgtggcgggcgtggtcaggaagtctatcaaacgttgctcaaaagcctcatagattccattactacctgcctcgctcggcggtagattatcattacccaaagcggcaagcgtaatttccccgttattataattaaacatcgtttcttttaaaaaatcgacgcaacgttcagaacactccgtctcggtcactaatactccatcgtaaaacatctgtagtagtaacatattttcttgatgtgctaatacctctacagtgtatttatctattgtttcaggtctggaggcatcaataagtttaatatatccaagaagggggcgccatcgtgtacagtcttcatctcgcttcgaaaatggtcctggagagaaaggccctttaatatcgggatgctcttttttttggcacagtagattatagatttctctataatcagaaattaaacttcgcctggtaaatatattcctgaaaaaatctataaatttctcacacgttgaaaaaacatgttctcttttattatcgatgatatctcttaaatacctttctgatatctggcaactatgatttccgatctgaaatgtaaacggcatatgtctcatcctctgaaaatttattataatacacatgcaaacatataaaaacctgatttgtaactactgtaatcacctgatttccaaaatttttcatattcagtattactctgcatcaataaatagagaaaaccttcagcacctaaaaaagaaattatttttgttaagcatttgctggttaaagttacatgtccataacatcgctaataggtgaggtaaaccatttggatgaatattcaggcttcctacagaacctttatttgtctggtggaaagcgcatcgctatcgtacttgctatccgtcccggtgtctctggttggatgaggcgaaccttacaccagctggtatactgcaccgtagggcctgtcccattagactctttgatttgccagtttggccctggggagtgctcaaaatcctcagggacttcgttaccgtgtggttttagaacgtcacctgccggagatagcggcggaaaaatagcgtgacacacggggccaggagtgggatataatttcagactaatttcgaataatgttgaaaagttgctgttaaccattgttcgtaaaagcaaaaaataagcaatgactataaggattaaagctatgggttttctttccggtaagcgcattctggtcactggcgtggccagtaaactgtccatcgcctacggtatcgcacaggcgatgcaccgcgaaggagctgaactggcgttcacctaccagaacgacaaactgaaaggccgcgtagaagaatttgctgcccagctgggttccagcatcgttttaccgtgtgatgtcgctgaagatgccagcattgacgctatgtttgcggagctgggtaacgtttggccgaaatttgacggttttgtacactcgatcggtttcgcgcctggcgatcagctggacggcgattatgttaatgcggttacccgcgaaggctttaaagtcgctcacgatattagctcttacagctttgttgccatggcgaaagcctgccgcaccatgctgaatccgggttctgcgctgttgaccttgtcttatctgggagcggagcgcgccatcccgaactacaatgtcatgggtctggcgaaagcctctctggaagccaacgtgcgttatatggcaaacgctatgggaccggaaggggttcgcgtcaacgccatctctgcgggtccaatccgcacgctggcggcgtccggtattaaagacttccgtaaaatgctggcgcattgtgaagccgttacgccaattcgtcgcaccgtgaccattgaagatgtgggtaactcagcggcgtttctgtgttccgatctctcggcaggcatttctggcgaagtcgtccatgttgacggcgggttcagcattgcggcaatgaatgaactggaactgaagtaagcgcattaagtttattagcgggcggcacggctgtgctgccccattcccctcactcaccactcatctcgttatatagcgttctgatatttgttatcacctaacaatctttcatccctttcccgcatacgccaggataatccagcataaacgatccgacgccgaatcattatcgatcgccatttcatcctcgggaaaccctatggaacaatgccgaaaagcgggtaaaagccactggtatcatgaaacacaatccactatgtcgtcacaaaccccgctttcgctaatgccggaagccgcgtatgttaacgatcgttttttactggatttaacggtagcagaaaccgcgttgacgccttttgagtcatggttaaagcccgctcgccagttggcggatgtcttatttccccgcacggttctcaacgaccggcttcatacgtttagcgcctatgaacgtatgagcaccgcgctgaccgccgctcaggtatttggggttcagcgtttgtgtcgctattatgccgcgcgtctggcgccgctacctggccctgacgcctcaagagagagcaatcaacggctggcgcaaattacgcaatacgctcgtcagcttgccggctccccctccgttatcaatacgcgggcccgcgaacagcttgcagaggtgggattaaccgcccgggataccgtactcatcaatcagatcattgggtttatcggttttcaggcgcgggtagcggcgatatttcaggcgttttgccgtctgcccgtgcgcgaactgcccggccaggagatgcagcgctttgccagggccgcgcggtttcaaaacccccagacgatatggcggcccgccgccagtctggtagaatatcctccagcccataccaaagttcggcggcaatattcgtcttcacaatgccaaatgatggcgccggtactcatgcgcgatccgtcttcattcgcgttactcgaacgcatactgaccagcacattacacactgcatcgcccccttctttacttccacttatcacgctcctcacatcacgtatcaacggcagcgccgcctgctttaacgaacaggcaacccaacctggcgcgtggcgtcgcgctgtcatcacgttacgccaggaagacgacgacatcgctcgttgggaacttgagcctgcgctgacacaggcgatacaatggctcaccagagcgcccgatcgctttagcgccgcgcattttttcccgctactcaccaggggagtttcatcggagcaggccattaatatgttaggctggtgcggcgtgtgcggatggttaaatcgtttaaaaatcgcgttgggcgaaacctattaactcatccattactgaaagagcgcttgctgcgccaggcagaatcgcgtaaaactgtcagccgctcttttggctacgaaaatagacgaatatgtttcaggacaacccgctgctagcgcagcttaaacagcaactgcattcccagacgccgcgcgctgaaggggtcgtaaaagccacggaaaaaggctttggcttccttgaggttgacgcgcaaaaaagctatttcattcctccgccgcagatgaaaaaagtgatgcatggcgatcgtatcgtcgcggtcatccacacggaaaaagaacgtgagtctgccgagccggaagaactgatcgaaccgttcctgacgcgttttgtgggaaaagttcagggtaaaaatgaccgcctgtccatcgtgccggatcatccgttgctgaaagacgcgattccctgccgcgccgcgcgcggcgttcagcatgagttcaaagaaggtgactgggcggttgccgaaatgcgccgccatccgcttaaaggcgaccgttcgttttacgccgatttaacgcagtacatcacctttgccgacgatcactttgttccctggtgggttacgcttgcccgccacaacctggaaaaagaagcgccgaacggcgtagcgacggagatgcttgacgaagggctagagcgtcaggatctgaccgcgctgaatttcgtcactatcgatagcgccagcactgaagatatggatgacgcgctatatgctgaggaattagcggacggcagactccagcttacggtggctatcgccgatcctaccgcctggattgccgaaggcagtaagctggataacacagcgaaaattcgcgccttcaccaactacctgccgggcttcaatattcctatgctgccgcgtgagctgtctgacgatctgtgttcgctgcgcgccaacgaagtgcgtccggcgctcgcctgtcgcatgataatcgccgcggacggcaccattgacgatgatatcgccttttttgcggccaccatcgaatcgaaggccaagctggcgtacgacaatgtctccgactggctggaaaataacggcacctggcagccggataacgaaggcattgcccagcagattcgtctgttgcaccgtatttgtctaagccgcagtgagtggcgtcatcatcatgcgttagtctttaaagaccgcccggattaccgctttgtgcttggcgaaaaaggcgaagtactggatattgtggcggaaccgcgccgtatcgctaaccgtatcgtagaagagtcgatgatcgccgctaacctttgcgccgcgcgcgtactgcgcgataagctcggtttcggtatttacaacgtacatacgggcttcgatcccgcgaatgccgacgcgctggccgcgctgctgaaaacgcatggtctgcatgtcgatgccgaagaggtgctgacgctggaaggcttctgtaaactgcgtcgcgaactggatgcgcagccctccggtttccttgacagccgcattcgtcgcttccagtcttttgcggaaatcagcaccgagccggggccgcatttcggtcttggtcttgaggcttacgccacctggacctctcctatccgtaagtatggcgatatgattaaccatcgcctgctgaaagcggtcatcaagggggaagctattgcgcgtccgcaggaagatatcacccaacaaatggcggaacgccgtcgcctgaaccgcatggcggagcgcgatgtcggcgactggttatatgcacgcttccttaacgataaggcggggacaaatacccgtttcgcggcagaaattattgacgtcagccgcggtggtatgcgcgtgcgactggtcgataacggcgctatcgcctttatccctgccccgttcctgcacgccgttcgcgatgaactggtatgcagccaggaaaacggtacggtacagattaaaggtgagacggtttataaagtgacggatgtcattgatgtcactattgcggaagttcgcatggaaacccgcagcattattgcccgaccggcagcgtaaccacgcttagctcactcaacggcctttgctgagaaggcaaaggccgtttcttttcttcttctcccttccgtcatgctctaagtttaatcttattcaagcgccccatttcttgttatttttagctggcgactatgctttttccagaatctggattacatatgaatacatagataaaacaatacgttcagccataattacccttatttataacatggctaacctttcttttcgggcacctggcgcttaaatgggatggtacgcatgatgaaacagattcaggaacaaacggcgctaaatccccttcactctcactggcgtctggctgatgaccgcaacgtgctgtatctctccccgacaggtgaaacggatgcagaaaaaacggttgagctatcgccggaacaagccgggcgtatccgggaaataacggcgattacgtccagtctgctgataacgttgttgatagaaaaacaggttaccgctgtgcacctggtaggccgtaagattaataaccgtgaatgggctggcagcctggcaacctggcctgatacgcctgccgtctcgccaacgcaggcgcaggagctctcttttgccgagcaaatcgtatcagaagccaactcagtcattgcgatactggatagtcggggaaaaatctgtcgatttaatcggttatgcgaagagtacacaggcttaaaagagcgagatgtaattggtcaaagcgtctttaaattatttatgagccgccgggaggcggttgcctcccgacactacattgagaatttttttcgcaatggcaatgcctatgaaatcgaacgctggataaagacccgtaaaggccaacgcctgttcttatttcgtaataaattcgtccataacggtagcggaaaaaacgaaattttcctgatctgcgcaggcacggatatcaccgaagaaaggcgggctcaggagcgtttacgcatactggcgaatacagacaccgtcaccggcctgcccaatcgcaatgctattcatgaatttattaatcatgctattgcctcggctggcgagtcgcaggtgggtatcgtttatctcgatctggataacttcaagaaaattaatgacgcctatgggcatatgtttggcgatcagctcttacaggccgtttcgctggcgctgttgagttgtctggaggaagatcaattgctggccagactggggggagatgaattcattgtcctcgctgcccatacgtctcaggccgcgctggaagcagtagcctcacgaatccttacccgtctgcggcaaccgtttcgtattggactcattgaagtttacacgggatgcgccattggcatttcgttggccccccggcacggacaggacagcgaaagtctcattcgcactgccgacaccgcaatgtataacgccaaagaaggcggccgcggtcagttctgcgttttttcgccggaaatgaatcagcgcgtatttgactatcactggctggatacaaacctgcgaaaagcgctggaaaacgaccagttacttattcactatcagcccaaaattacctggcgcggcgaagtacgtagcctggaagcgctggtacgctggcaatcgccggaacgcggattaattccgccgctggagttcatctcatacgccgaagagtcaggactcatcgtcccgctgggccgctgggtgattctggatgtagttcgccagattgcgaaatggcgcgataaggggattaacttgcgcgtagccgttaacttttcggcgcgacaactggccgaccagacgctttttactgcgcttaaacaggctttgtacgatctgaattttgagtattgcccgatcgatgtcgagctaacggaaagctgcctgatcgaaaacgacacgctggcgctatcggttatccagcaatttagtcagctcggcgcccagattcatctggatgattttggcacagggtattcttcgctttctcaactcgcccggttccctattgatgccgttaaactggatcaggctttcgtcagagatatccataagcaaccgctgtcgcaatctctggttagggcgattgtcgcggtggctcaggcgctaaatttacaagtgattgccgaaggtgtagaaaatgctaaagaagatgccttcctgacaaaaaacggcgtcaatgaacgacagggctttttattcgccaaacctatgcccgccgtttcttttgaacgctggtacaaacgttatcagacgaaaaaaatgcgttaatggcgacgataatagggagaacaacctgtgcagacaggcatagccctatttttcccttctcttttcagattaatttctgcatcatgaattgaaaccttttctgacattaaggatgacaaacatgtctgatatcgaagcacaacgaattgccgcacgcattgataccgtgctggatatccttgttgctggcgattaccactcggccatcaataaccttgaaatattgagagcagagctgttagatcaggttaaagacggtatctcgccatcccaggctcccgggtcgccctgggaaatctgatagcgattatttgtccgggatggccgttagcccttcccggctctctgactgtctgttgactcctcttaacgaataaaattaatactatgaactcccgacaacaatcaattttgcaaatggtggttgataaaggccagatgagcgttgctgaactggcgaaaattaccggcgtatctgaagtcacgattcgtcaggatctgaataccctggaaaagcagagctatttacgccgtgcgcacggtttcgccgtttcgcttgagagcgatgacgtagagactcgcatgatgacgaactacacgctaaaacgccgactggcggagttcgccgcctcgctggtcagtccaggggaatccgtttttattgaaaatggcagcagcaatgcgctattggcccggacgctggcggaacaaaaagatgtcacgatcatcaccgtgagcagttatatcgcgcacctgctcaaagagaccccttgcgaagtcattctcctcggtggaatctatcagaaaaaaagtgaaagcatggtagggccgttgacgcgacagtttatccatcaagtgcatttcagcaaagcatttatcggtattgatggctggcaggctgataccggttttaccggacgcgacatgatgcgatcggatgtggttaacgctgttctggaaaaaggctcagaagcgattgtcctcaccgacagctccaaatttggctgtgtgcatccctatcccctgggcccgctctctcgcttccatcgtgtcattacggattccaaaatttccgccagcgatcaaatgcagttagaacatgcggggctgctagtcaatgttattggctcatccgtttaaaatatttcccgatggtttgccctatggcaaatcatcctctctctaagacttttctgacatcccaattaagactatttacctgttgtaacgagcgtaacgtcgtaaaattaatattagcgaaataacaggaagtgactatcacctgcgtgatatacccctgcgcaatcaggttttacggaaaatctcttaacaggttttattttaactatagttatagtgagcttaattccgtgaatcgttaattcaggagagagtattatgtttatgacgagcaaaaaaatggccgctgctgtgctggcaatcaccgtagcaatgtctctgagcgcctgctcaaactggtccaagcgcgatcgcaacacggctattggcgcaggtgcgggggcgttaggcggcgcagtgttaacggacggcagtacattaggcaccctgggcggcgcggcggtcggcggcgtgattggtcaccaggttggaaaataatccagacgtttaaatattgaacggctcaaaataatacgtttattcttttcaggtctggattacaaaaatagacaaagttgacttttacgccacggtaatttacaaccgtggcgttttcattagccgccagctaattttactttcattcctttagcttccagcaatgattttatcaagtcgcgtttatcaccctgaatttcaataatcccttcttttactgccccgccacagccgcattttttcttcagttcagccgccagtttggttaattccgcatcattcatctcgataccggtaatcaaacatacgcctttacccttacggccactggtttgacgctgaatgcgaacgataccatcccctttgggacgaaccggcgccgttttaggttcttcaatgcgccccgtctgcgttgaataaaccagacgactattggaatcgctcattatgcctcccgtttcagtgacgcgttaatatccttcagcgtttgcgccggatctaccgattgcgtaaccgggcggccaatcaccatatagtcaacgccagcggataatgcctgttcgggcgtcataatgcgtcgctggtcgcctgcctcgctgcctgcgggccgaatgcccggcgtcactagcttaaatgcagcgccaaaggcctgtttaaatctgacagcttcctgagcggaacagaccacgccatccagcccgcattgctgcgtcaggcgcgccagccgctccgcatgttccgccggtgacaacgtcacgcccagatcgtgtagatcgctggtttccatactggtcaacacggtcacggcaatgagcaacggcgcatctttactgaatggcgccagcgcgtcgcgcgctgcggccatcattctcgccccgccagacgcgtgaacgtttaccatccagacgcccaggtctgccgcagcggcgaccgcccgggccgtggtgttgggaatatcatgaaattttagatcaagaaagacatcaaacccacgttgctggagatcccgaacgagctgtggaccaaacagcgtgaacatctctttgcccacttttaagcgacaatcgcgaggatcgattttatcgacaaacgccagggctttatcgcgttcatggtaatccaacgccacaacgacaggcgattcagtaatagcgcaggaagaagatgaagcagtaaacgtcatgaccagaccttcttgatgatgggcaccggaagtggcgcaaattggataaacggcgtgcattctacctgcggcgcagggaaattaacaggttcgattgacaacctgataagccctggtcgccgatgctagcgtcgtttcttgttttatgtcattaagtatgttgtaactaaagcgaggctttttttatatactactgcccatcaagtccgcgaataggtttaatggtcgaccatgcccggcaggacggacagtgccagtacaaggtataggcggtaaaaccgcatttctgacaacgataccgcggtttactgcgcacctgctcgccaaccatatcacgcagtaccatcaggctttctttcgctcgcccttcttccgcctcgttgagatggtaatccatcagcttatggaacacccgcatggtaggatgtcgctgtagctgacgcgtgatatagacttgagctgcgtcactaccttcacgtgcttccagaatatcggcaagcattaactcagcgccagcaccggtattctcctcaacggcgcgacgtaaaaactccgcccactcggcatttttaccgagctgttgataacaggtttgcagcatctccagcgtttcgctgaccagctctttatcctgaacgatcacacgttgcaggctttcgaccgctttggcgtaatcccctctcgccatataaacgcgccccatcatgatagacacccgggcgctatttttatctgcggcggcaccttttttcagcaacgccatcgcgcgatccatgtcgtcgttgcccatctgctgtaacgctaactcacagtaaaagtgggcgatttcgatacgctgtttatctttgcccagtttcaccagccgttctgctacttcgatcgccttttgccagtcgctggttagctgatagatttgcaagagctgctgtaacgcgcctacgcgaaattccgtttcgtcggtaagttggttaaacatatcttccgcgcggtcatataaaccggcggccatatagtcgcgccccagttgctgaacagccagtaaacgctgttcataggtcaatgaagcgctttccatgagcgtttgatgaatacgaatggcgcgatcgacttcgccgcgtgagcgaaacagattaccgagagtgagatgagcctcaacggtgcccgtatcctctttaagcatatcgaggaacagatccaccgctttatcttgttggttactcagcaggaagttaacccctgcgacataatcgcgcgacaggcggttagcttcatcctgttttgtttgttgcgcacttctgcgacccatataccacccataggcagcggctacaggcaacaacagaaataacaactccaacataaatgattattcctttacaaccgacgaatcggcagggaccgcaacgtcggttgctggcgagagcttgttttccagtcgtttaattttacgttcagcgcgggcaagggaaacgcggacccgcagccagaacaggccgcaaatcagccagccaatcgcaaaaccgacggcgaacagcacagcaagcaacgtggagatacgatactccccttgcgccagcaggtagttaaacgtcacctgttgatcattctgcgcgcccagcgtcaccgaaataacaaaaatcgccaataccagtaagaaaatgagtaaatatttcacattacttcccgttatgtggtttgcgcgaataaatcgtgtccaacttaccgcatccagccttctaaattaccattttcccgcctcgcgcgaaatggaaatgcgcccaccatcagatgatttaagggcaatagtcagaaaatcaaccgttgtcagctttcctgctcgcgttcagcaatttcttgcgcttcttcgcgaggcggcataagcggcccgcaaattcgctgcgccagccaggtcgccagggtaactaatagccaggagatgagcgtggcgaccactaaatctcgcggccagtgcattcccagaagcaaacggctgcccattacgccggtcgcccagactaacaaaaacgcgatggtgaaagtccgtctgcgcggccataacagacccacggccaaaagcgcccagctcgctgcaaacatggtgtgtccggagggaaacgcaaagcccgtctctttttgccagtgctgacgcaggaaaacggggatgttctgttgcccggccaactgctctttcactaaatgtccgcgttctgtacgctttaaagtgtagaactcatcgacgggaatatggtgcgttttttcaagccagaccacaaatggccgcggctcctgtacgcgctcctttacccatgacttcacgccctgcccgacgataatcgccccaccgagaatcgcaaacagcataatggcggcgcgcaggcgaaatcgcaggcaccataagaaccatccacaaagaatcacatgcgtgataacgccccagggtttggtcacggtttccgttatccagaatagcgtttttagccaccagacctgatgtcctggctgccactgccagcctgatacccatacggcaagcggcatgataagcaacagggcggcgcctgccgcggtgcgcctcgcaattgaaagcatggatgctccttttataagtaagtatcacaatcataactgaaaattctcgccggactggaaaattgacaaatttgtgccattcctgagcaattacgtggtagtgattaggtgatgtccgccgccttatggcaaaatagcgggatacaagccaacaggcgacgacaccgcaggcgtcagcataatctggagaaatacatgcagcttaaacgtgtggcagaagccaaactgccaaccccattgggtgactttctgatggtgggatttgaagaactggcaaccggacacgaccatgccgcgctggtttttggcgatatttcaggtaaaacgccggtactggctcgcgttcattccgaatgtcttaccggggacgcgctttttagtctgcgctgtgattgtggttttcaactggaagccgcgctgacgcatattgcggaagaaggacgcggtattctgatttaccaccgtcaggaaggccgcaatatcggcctgcttaataaaattcgcgcttatgcgttacaggatcaaggctatgacacggtggaggccaatcatcagctcggctttgccgccgatgagcgtgatttcaccctttgcgcggatatgttcaaattactcggcgtggatgaagttcgcctgctgaccaataatccgaagaaagtcgaaatactgaccgaggcgggaattaatatcgtggaacgcgttccgctcattgtgggtcgtaatccaaataatgagcattatctcgatactaaagcggccaaaatgggccacctactaagtaagtaagccaccggtattaaagcgcgggcctgcctgtttacggcaggcccgataaacggctttagttcagcatatttctaatgacatagtgcaagatgccgtcattctggtagtaagtcagctcggtggcggtatcaatgcgacagcggcaaggcaccgtttctttgctgccgtccgatctcgttaacgtcaccggaatggtcgcgccagggcgcaggttttgcagatccgcgatatcaatcacctcttccccggtcagtccaagcgttttacgcgttacgccctgtggaaactccagcggcaggatccccatcccaatcaggtttgagcggtggatacgttcgaacgactcggcgatcaccacgcggatacctaacagccgcggaccttttgccgcccagtcacggctcgatcccgacccatactctttcccggcaattaccgccagcggcgttttttcctgctggtagagcatcgcagcatcataaatcgacatcgcttccgtacccggtaaatgccgcgtcatgccaccttcgacgccgggcagcatttcgttgcgaatacgaatattggcgaacgtaccgcgcatcatcacttcatggttgccgcgccgtgatccataggagttaaaatccttccgctcaacgccgtggttttgcagatagcgtccggcgggactgtccggcttgatactgccggccggggaaatatggtcggtcgtcaccgaatcgcccagcatcgccaggatacgcgcgccgtggatatctttgactggcgcaggctgggcctgcatttcatcaaagaaaggcgacaggcgaatataggttgaatccgactgccagccgtaggtatcggacgattcaacctgaatcgatttccattcttccgtgccctcaaacacttccgcatactctttacggaacatatctgatgataccagttcaacggcgcgggcaatttcctgcgccgaaggccagatatccttcaggtataccggatcgcctttacgatcgtaccccagcgggtctgtcgcgaggttaatattcatgtttccggccagcgcatacgcgaccaccagcggcggcgacgccagccagttcgttttcaccagcggatggatacgcccttcaaaatttcggttaccggaaagcacggcccctaccgtcagatcgccttttttaatcgcggtctcaataggctccggcaacggaccggagttcccgatacaggtcgtacagccataaccgaccaggttaaaaccgagctcatccagataaggcgtaagtttggcctgcgccagatagtcagataccacttttgaccccggcgccagagaagccttgacccacggttgacgcttcaaccccagcgttactgcctttttcgccagtaatcccgccgccatcagcacgctggggttcgaggtattcgtacaggaggtgatggcggcaatgacgacagcgccatccggaagctgatatggctgtccgttcatcgtatagtcaaccggctggcgatctctttgcgcggtattcagctccagctcggcgctggcggcaaaggctttcggcacatcgcctaacgccacgcgatcctgcgggcgtttcggcccggccaggctggcctcgacatcgcccatatccagttccagcgtactggtaaataccggttcgtcaccgggattacgccacattccctgcgccttcgcgtaggtttcaaccagctcgaccagatcgtcgctacgtccgcttaatcgcatatattccagggtgatggcgtcaatggggaagaaaccacaggtggcgccatattccggcgacatattagcgatagtcgcgcgatccgccaacggcagcgaatccagaccgtcaccataaaattcaacaaatttacccacgacgccatgcttacgcagcatttgcgtgacggtgagcaccaggtcagtggcggtgatcccctcccgaagcttaccggttaacttaaagccgacgacatccgggataagcatcgacacgggctgaccaagcatcgccgcttccgcttcaataccacccacaccccaccccaatacgcccagaccattaatcatggtcgtatgggagtcagtccccaccagcgagtccgggtaagcaatccactccccgtcctgtaattcgctccagacggctttacccaggtattccaggttaacctgatggcaaatgccggtgccgggcggcaccacgctgaaacggctgaatgcctgctttccccatttcaggaacatataacgctcatggttacgttccatttccagccgcacgttttcttcaaacgcatcatcatcgccgaaatgatcgaccgtcacagagtggtcaataaccagatcaaccggcgataacgggttcactttcgacgtatcgccgccgaggcgtttaacggcttcacgcatcgctgccaggtcgacaacggcaggcacgccggtaaagtcctgcatcaggacacgggcgggccgccaggcaatttcacgatcggcatgggcatttttaagccaaccggccagcgcctgaatatcttcatcagtcacagattcgccgtcctgccagcgcaacaggttttccagtaacactttaagtgatttgggcaaacgggcgatatcgcccagggatttggcagccagcggcagactgtagtaatgatacgttttatctttggcctgcaatgtatccttactggcttctcgtagggttgacgacatagctcctccttaaatgacagggttgcgttaccctgattctccacagggttgtattaaagataacacaaacaaaatgtaacgttttgataacaacccaaattgctaaaagaggagaaacctaacaggcgagaagcgaagatgaaaaagcccgataaataacgcattatcgggctttgacgagattagacggcaatccagattaactcggcccagaacagtagcgataatataaacgcgccagtccatgaccaatactttatatttgacgttaacataggcgacaccaactgtgtttaatcaatactgagaggcgctcagcacacggttgctgcggtgtaataagacagcgttaataaaacagtaacgccaataaaaagacgaatattatttttgtgacacctcgtcagcaaaagcatcaataaatgcccgctgctgcggtgtgggcgtccagtgttgcggaacagaccgaaaaacggtcgtatccggggtgttatcatcgtcaccagattgaatcgggggcgcgaccacgcgctcgcgttccgacgtaatgctcacttagccccaccaatgccagataacaagcgctaccactacccagaacaacgcagaacccacaaaaaccgccagccatgctttacgtttgagctcagggtcgcggcgcggttcctggttttcagaaggcattactaacctcatgctatcggtatcacttatcatttcagcaccaaacaatcggtacaattaatcatcagatgagacaaatcctaaataaactttagtcaaaaatccagtcaatttacgaatcgttgccagtgaataaatcaatcttttgactcaagataactatttggaaaaagaaactggcgggacgggtaattcaacactattttgctgatcattacccgtaatacttcgagggatattgcaaaaggcggctttgtctgccatgccactacgacacaaaccgacggtgatattacttttcaggcagctttatatcctgaaacatcgcttcaatttcttcattagaacgcaacgccaccgccgtatccaccacatcacgcgtcagatgtggcgcaaaacgctggataaaatcatacatatagctgcgtaaaaaagtactacggcgaaaaccaatttttgtggtgctgtggctaaaaatatcgtgcgcgtcaatccgcactaaatcaggatcggcaagcggatcgaccgccatgctggcaatgacgccaacgcccagtcccaacctgacatacgttttaatcacatccgcatcggttgcagtaaagacgatccgcggcgttaatcctgcgcgattaaaagcggtatccagttcggaacgcccggtaaagccgaaggtatacgtcaccagcggatactgcgccagcgcttcgatcgttacggaagacgttgccgccaatggatgatccggcgtcaccactatcgaacggttccagtgatagcatggcaacatcaccagatcgtcatataaatgcagcgcttccgtggcaatcgcgaaatcggcgttccctttcgataccgcttccgcaatctgcgttggcgacccctggtgcatatgcagcgaaacgcgcgggtaacgctcgatgaagcctttaatcacgcctggcaatgcataacgcgcctgagtatgggtagtggcaatatagagcgagcctttatccggccaggtgtgctcgccggcgaccgacttaatggcatcgactttggaaagcacctcacgcgcaatacgaataatctcctgacctgcgggcgtcacctgagtcagatgcttaccactgcgggcgaaaatctggatgccaagctcatcttccagcatccgaacctgcttgctgatccccggctgggaagtatacaacccctcagcggtagaggagacgttaaggttatgattaaccacttcaacaatgtaacgaagctgctgcaatttcataatacatcatccagattagcgccatcaggccatcgtttatctgcagacttaatcgggctgctaatacgatttaataataaaaaaggtgttaactataaccactatatcatttatatctgaactgtatagccagcgcgataaaataataagcccgctatacccaaaataattcgagttgcttaaaggcggcaagggagtgagttcccagaagcatagataacgatgtgactggggtgagcgacaaatctgccgggagcagatttgaacgtcgcgtgcgacggcccgtcagggcgagcccatggatgggccgagtaatccgtagccaacacataagccactttaaatatgaaggggatataaaaaagggccgcttacgcggcccgcttgactatagtgacgacaggcaggggttatttcttgccttcaacccacttgccgtcgacgaagaacgctgaccatcccgtcgccttcccgtctttttccgccgcaacgtactgctgttttgttttgcggctaaagcgaacaacggttttattaccttccgggtcctgctgcggcgcatccgccagataacgcagtttttccggcaggcgatcgcggaaccggtacagctcctcgactaatggcgcgcgagtttcgcgtgatttcgggaacgtattggccgccaggaatatccctgcggcgccatcgcgcagcacaaagtacgcgtccgatttttcacacggcagttccggtaatggaacaggatcttccttcggcggcgcaacttcgccgttacgcaagatcttacgggtatttttacattcgtcgttagtacaggccatgtacttaccaaaacgccccattttcaggtgcatttcggaaccacatttctcacactcaacgatcgggccgtcataccctttgatgcgaaactcgccttcttcaatctcgtagccgtcacaggtcgggttattaccacacacatgcaatttacgcttcggatcgatcagatagctgtccatcgccgtaccgcacttctgacagcgccgcttggcgcgcagggcgttggtttcggcgtcgtcgccttccagcacgttcagaacttcattttccggcaccaggttaatggtcgttttacaacgctctttcggcgaaagcgcataacctgaacaaccaaggaaaacccccgtactggcagtacgaattcccattttacggccacaggttggacagtcgatgctggtcagcaccatctggttaggacgcatccccccttcttccggatctttctcggctttatcgagctgctgagtaaaatcgctgaagaagttatccagtaccgctttccactcggcctggtgattcgcaacctgatccagactatcttccatctgcgcggtaaaatcgtagttcatcaattcgcggaagttttcttccagccggtcggtgacgatttcacccattttttccgcatagaagcgacggttttcaacgcgaacatagccgcgatcctgaatggtcgagataatcgacgcataggtagacggacgaccaataccacgcttctcaagttctttaaccagagaagcctcgctgaaacgggctggcggtttagtaaagtgctgagcaggcgtcaattcaagtagcgtcagcgcatcgcccttattcacggcaggcaatgtgcgatcttcatcgcctttacgcagcgccggcatcacttttgtccagccgtcaaagcgcaaaatacgcccacgcgctttcagacggaattcgcctgcgccaacggtaagcgtagtggagtcatattgtgctggcgtcatctgacaggcgacaaactgacgccaaattagctgatacaacttctgcgcgtcagcctccatgtctttcagagactccgccatgacagcaacgtcggaaggacggatcgcttcgtgcgcttcctgagagttttctttgctggcgtactggttcgggttatccggcaggtatttcttgccgaaattatcgccaatataaccgcgcaccatgttgaccgcatcctgactcaggttggtggagtcggtacgcatataggtgatgtagcccgcctcatacagacgctgcgccatcatcatggttttcttcacgccaaagcccagccgggtgctggccgcctgttgtagcgtggaggtgataaacggcgcgccaggtttgctgctggtcggtttgtcttcacgctccagtacgctatagcgcgctttttccagcaagctgacggcggcaagcgtctgctcgcgatttaccggccggaatggcttgtcgttctgatgcgtcacctgtagcggtagtgcctcgccagacggcgtcgtcgtattagcgtcaatttcccagaactcttccggaacaaacgctttaatctcgcgctcgcgttcaacgaccagacggaccgcgacagactgaacgcgacctgccgacaaaccacgggcgatctttttccacagcagcggcgagaccatatagcctaccacgcgatccataaagcggcgcgcttgctgggcgttgaccctgttaatgttcagctcgcccggctgttcaaacgcctggcgaatggcatttttggttatttcgttaaagactacgcgactgtagcgcgcgtcatcgccgccgatcacttcccgcaggtgccatgcaatggcttccccttcgcggtcaaggtcggttgcgagatagatgtggtcggctttttccgccaactgtttcagttcagagacgaccttctctttaccgggcagcacttcatagtgcgcatcccagttgtgccacgggtcaacccccatacggttgacgagagcgccacgttcatcctttttgggctttttagccgttttggtggaggtagagtcggcgctctttttagctgctgagccactggtcggcaaatcacggatatgacccacgctggatttcaccacgtagtcattacccagatacttgttgatcgttttggcttttgccggggactcaacgatgacaagagctttacccatattcacctttacctaagttgattcttccaggaatgcgtcgcacgttgattcaccttccactggcgacgagacaacgatatatggtctctgcgtctgcggatatcaaccccttgtactggctttgtgtacgaaatgtaaccctcaggtgactgagttaacaggcttttttgcacacacgcgctatagcacgacggaattttggtcgaatgtcaagcaattctgttgccagattgacgaaagcgtcacactgtacctgataaaattcgatacgcaactttattagcatgcaaaaacaaatcttgccagtgaacgcaacatgacaaatccatcaatttcctgtgagaatatttgcccatcagaagtgctcagcgtagactaatctccttgtttaaggagtaaaaaatgcataaagagacgcaacctatcgatcgcgaaacactgttgcttgaagccaacaaaattattcgggaacatgaagacacgatggcaggtattgtcgccaccggcgtaacgcagagaaatggcgtgctggttttcagcggcgattactttttagacgagcaagggttaccgacccctaaaagcaccgcggtgtttaacatgtttaaacacctggcgcatgtgctgtctgagaagtatcacctggttgattaatccatgccggatggcgctgaatgccatccggcaatagcggtttacatcaacggcttttgtccacgctgccaccagcgcagcagcagccgatccgcgctttccgccgcgctgccggtaacacgatcgatcagttttttacgctgcatatagcgcacattcagcacctcgcgcccttccatcaggccgaggataacctcatcgctggtgttaatctcatcaaccagtcccttctccagcgcctgctgaccgtaccagtgttcgcccgtggcgacctgttcaatgtccagagccggacgcatccgctgcacaaactctttgaacagatggtgcgtttcgttgagatcttcacgaaacttctgccgcccttcttccgtattctcgcctaacaaagtcagggtacgtttgtactgccctgcggtatgcagttcaatatcaatgtctttacttttgagaaagcggttaaagttcgggatttgcgcgacaacaccaattgaccccacaatagcaaacggcgccgcgataattttttccgccacgcaggccatcatatagcctccgcttgccgcgactttatccaccgtcacggtcagcggaatatttttatcgcgcaggcgctgcaattgcgatgccgccaggccatagccgtgcacaacgccaccggggctttccagacgcacaaccgcccgatcgccgggtttcgccactgccagcaccgccgtgacctcttcgcgtaacgcattaacttcgtgagcgtccatactgcctttgaaatctatcacccatacgcgcggtttgtccgatgtcgcaatgtcccccagcttcgctttcgctttggcggctttcgcctcctgcttatgcttttttttctgcgctttatgccacagtttttgctgatggccatccatcaacgccgcagcaaggtcatccttcatctcctgatactgctcactcaaattggtcacgcgcagctcgccgcgctgacgtttgcgttgcgtagcattcacgatcagcagcacaatgacggcaatggccaccacaacggtgacgatttttgccaaaaataagccatattcagacaacaattccacgactcccaccttgattaaataacgcgacttgcgctcagtgtacaacaggcatcgaagtcagtctctcttcatccgtatgcctgttgaggaagaaaaagtatgacaagacgttcattttacggcgttatcgcccctgtctgattgaaaaaaaaggcgctttcaggcataaacccgaaaagttaacgcgaagataagacaacctggcaggacggtgcaccacaccgttgaggagtagccatgcattaccaaccgaaacaagatctattgcaaaaccgcattattctggtcactggcgccagcgatggcattgggcgggaagccgcgctcacgtatgcgcgttacggcgcaacggtgattctgctgggacgcaacgaagagaaactgcgtcgggtcgcgcagcacattgctgacgagcaacatgttcaaccacagtggtttacgctcgatctgctgacctgcaccgctgaagagtgccggcaagtggccgaccgcatcgccgcgcactatccccgcctggatggcgtcctgcacaatgccgggttactgggggaaatcggcccaatgagcgaacaagatccgcagatctggcaggatgtcatgcaggtaaacgttaacgccacctttatgctcacccaggcgctgttaccgttattattgaagtccgatgccggctcgctggtctttacgtcatcaagcgttggccgtcagggacgcgccaactggggcgcctatgccacctcgaagtttgctactgaaggaatgatgcaggtgctggcggacgaataccagaaccgttctctgcgtgttaactgcattaacccgggcggcacgcgcaccagtatgcgcgccagcgcctttccgacggaagatccacagaaattaaaaacgcctgccgatattatgccgctttacctgtggcttatgggcgacgacagtcgccgtaaaaccggtatgacctttgacgcccaaccgggccgtaaaccaggaatcgcccaatgagtgatgaacgttatcagcagcgccagcagaaggtaaaagatcgggttgacgcccgtgtcgcccaggcacaggaagagcgcggtattattatcgtgtttactggcaatggtaagggcaaaaccacggcggctttcggaactgccgcccgcgccgtaggacacggtaaaaacgtaggcgtggtgcaatttattaagggcacctggcccaacggcgagcgtaatctgctggaaccgcatggcgtcgaatttcaggtgatggcaacgggatttacctgggagacgcaaaatcgcgaggcagacaccgcagcatgtatggccgtttggcagcatgggaaacggatgctggccgatccgctgcttgatatggtagtactggatgagctgacctatatggtggcgtatgactatttaccgctggaagaggtcataagcgcgctaaacgcgcgccctggtcaccagacggtgattattacaggtcgcggctgtcaccgggatattcttgatcttgcggataccgtcagcgaactgcgtccggttaaacatgcttttgacgcgggcgtaaaagcccagatgggaattgattattaaccgtaggccggattaaggcgtttgcgccgccatccggcacaaaccctcttgtctgatgatcctcggcctatagaccgcggtagagattacccgttgttattacgcccaccggagcggcgtccgccagctatctggctgtggcgttttaccgcccgacggatctggttcgctttcatacgacgacggtctttttcgacggcaaccttcgacgaggtttccggcgggagctctaccagaccacgcagatagttcgtttgcgcgaggtcgagctcagtccagccgccgcgcggcaggcctttcggcagcgggatatcgccgtaacgaacgcggatcagacggctgacctgaacgcctaccgcttcccacagtcggcgaacttcgcggttgcgcccttccgtcagcgtcacgttataccactggttaatgccttcgccgccgctgaatttaatggtcttaaatgccgccgggccatcttccaactgtacgccacggcttaaatcacgcagtttcgattcatccacctgaccgaacacgcgcacggcatattcacgttcaacttcgcgactaggatgcatcaggcggttcgccagttcaccgtcggtggtaaacaacaatagcccgcaggtgttgacatccagacgtcctaccgcaatccaccgcgcgccgcgcagtttcggtaagcgatcaaaaacggttggccgcccttcagggtcattgcgggtacacagttcaccttctggtttgtaataggccagaacgcggcaaatttgttccgccgactctttcaccgaaatcaggtgaccgtcgatacggattttcaaaccgggagtgacttcaacacgatcgccaagcgtggcgattttaccgtcaacgctgacacgtcccgcttcaataatggattcgatttcacggcgagagccgtggccagcgcgcgccagcactttttgtaacttttcgctcatagagcttccttcaggtgtcgccttcacaggcgtcgaacaggagaatgaacggcgcgttgccgcgccattttaaggccgcgtagtatacaggcttacgcccttataagaaaggtgtaacgtcgccgacgccttcgcgcagcaccaccggggagtcattggtcaaatcgattaccgtggtaggctgttgaccgaggtaaccaccgtggatgatcagatccacctgcttctccagccgatctttaatctcctccgggtccgactcggtaaaatcgctgccaggcagcatcaacgacgtcgagagcatcggttcgcccagcgtatccaataacgccaacgcaatcgggtttgacggtacgcgcaggccgatagttttacgcttttcctgcaacagacggcgcggcacctcttttgtccccttcaggataaaggtgtaattacccggcgtattgtttttcatcagacgaaatgccacgttgtcgacgtaggagtaggtcgacaactcggacaaatcgcggcacatcagcgtgaagttgtggccgtccggcagatgacggatgcggcaaatgcgctccattgcgcctttgtcttcaattttacaaccaagggcatagccggaatcggttggataaacaataacaccgcctttacgcacaatgtcgacggcctgattaatcagccgttgctgtgggttatccggatggatataaaaaaactggctcatacttccctcactgtgatatttgcggctgttcccatgtctgccatacgccttcaacgccagcgggcagccagagtttacgccccaactcaatccacgggcagggctgatggaaatcagatccaagcgatgcccataaatgatgctgacgcgcaagcgtcgccagttgggtgcgttcattgggcgattgttggcactgcgccacttccatcgcgtcgccgtgatggtcggcaaaatgcgccactaatcttttcagccacttagcgctaaggtcgtagcgtcccggatgggccaacaccgccttaccgccagaatgatgaatgacatcaatagcttgttctattgtacaccactgcggcggaacgtaaccggttttcccacgcgcgagatattttttaaaaacatccgccatggtcgcggctttgccgcactccaccagaaagcgggcgaagtggccgcgcgtcaccgcgccgccattggccagtctcaatgccccttcccacgcgccgggaatatgggctttttccagacgctccgcaatgagccgaccgcgtgcctgacgccgctctgtctgctgcgccagaaaatcgcgcattgccggatgcgcaatatcaatattcagacccacaatgtgaatctcatgattctcccagaccgttgaaatctccacgccgggaataagattcagggccagtccggaacgtgaaatttcttctcttgccgcaggaatcgcggctgtggtgtcatgatcggtaatcgccagcgtgccgactcgcatctctaccgcacggtgtactaatgtttctggcgtcaacagtccatcggacgccgtggtatgactgtgcagatcgtaaatcactgcgtaattcgtgtcgctcaaggcggctcccatagagataaagttatgtcatgtacatcataacggttccggcaaatatactgaaataggtgttgacattattccattgaactagttaactagtacgaaagttcacatgaagagggtatctaaaatggcagcgacatttgcattacacggttggtggcgcacttcctgatagcgggcggtgtatgaacagctgtaatcagccaaacgatacccggcccgcctgttaagcgggcttttttttgaacaaaataatgagaataaccatgcaaacaccaaaacccacgctcgaactgttgacctgcgatgccgcctatcgggaaaacccaacggcgctttttcaccaggtctgcggcgatcgcccggcaacgctgctgctggaatccgcggatatcgacagtaaagatgatttaaaaagcctgctgctggtagatagcgcgctgcgcattaccgctttaggtgacactgtcaccattcaggcgttatctgataatggcgcctcgttattgccgctactggataccgccctgcccgctggcgtggagaacgatgtcctgcctgccggtcgcgttctacgcttcccgcccgtcagcccattattagatgaagacgcccgtttatgctctctgtcggtatttgatgcgttccgtctgttacagggagtggtgaacataccgacgcaagagcgggaggctatgtttttcggcggtctgtttgcctacgacctggtcgctggctttgaagcgctgccacaccttgaggctggcaataactgcccggactactgcttttatttagcggaaacgctgatggttatagatcatcagcaaaaaagcacccgtattcaggccagtctgttcaccgccagcgaccgggaaaaacagcgcctcaacgcccgcctggcgtaccttagccaacagttaacccagcctgcgccgccgttgccggtgacgccggtgccggacatgcgctgtgaatgcaatcagagcgatgacgcgttcggcgcggtggtacgccagttgcaaaaagccatccgcgcgggcgagatatttcaggtggtgccgtcgcgccgcttttcactgccctgcccgtcgccgttggctgcctactacgtgctgaaaaagagcaaccccagcccgtatatgttctttatgcaggataatgatttcacgcttttcggcgcgtcgccggaaagctcgctgaaatatgacgcagccagccgtcagattgagatttatcccatcgcgggtacccgtccacgcggtcgccgcgccgatggtacgctggacagagatctcgacagccgtattgagctggacatgcgtaccgaccataaagagctttccgaacatctgatgctggtcgatctggcgcgcaatgacctggcgcgcatctgtacgccgggcagtcgctacgttgccgatctgacaaaagttgaccgctattcatacgtgatgcatctggtttcccgggtggtgggcgaactgcgtcacgatctcgacgcgctgcacgcctatcgcgcctgcatgaacatgggcaccctgagcggcgcgccgaaagtacgcgccatgcagttgattgccgatgcggaaggacagcgccgcggcagctatggcggcgcggtcggttacttcaccgcccacggcgatctggacacctgtattgttatccgttccgcgctggtggagaacggtatcgccaccgtacaggcgggtgccggaattgtgctggactctgttccgcagtctgaagccgatgaaacccgtaataaagcgcgcgccgtattgcgtgctatcgccaccgcgcatcatgcacaggagaccttctgatggctgatattctgctgctcgataacatcgactcgtttacctggaacctggcagatcagctacggaccaacggtcataacgtggtgatttaccgtaaccatattccggcgcagacgcttatcgatcgcctggcgacaatgaaaaatccggtgctaatgctctcccccggtccgggcgttcccagcgaggcaggctgtatgccggagctgctgacccgactacgcggcaagttaccgatcatcggcatttgtctggggcatcaggcgattgtcgaagcttacggcggttatgtcggtcaggcgggagaaatcctgcatggcaaagcctccagcattgagcatgacggtcaggcgatgttcgccgggctggcgaatccgctaccggtcgcgcgttatcattcgctggtcggcagtaatgttcctgccgggctgaccattaacgcccatttcaacggcatggtgatggcggtacgtcatgatgcggatcgcgtttgcggttttcaatttcatcctgagtccatcctgacgacacagggcgcgcgtctactggagcaaacattagcctgggcgcagcaaaagctggaaccgaccaacaccctacagccgattctggagaaactctatcaggcgcaaacactgacgcaacaagagagccatcagttgttttcggcggtcgtccgcggcgaacttaagcctgaacagctcgccgccgcgctggtgagcatgaaaattcgcggcgagcatcccaatgaaattgccggcgccgccactgcgttactggaaaatgccgccccgttcccgcgcccggagtatctgtttgcggatatcgttggtaccggcggcgatggcagtaacagtatcaatatctctaccgccagcgcctttgtcgcggcggcctgtggactgaaagtggcgaaacacggcaaccgtagcgtgtccagcaaatcggggtcatccgatctgctggcggcgttcggtattaatctggatatgaacgccgataaatcacgtcaggcgttagatgaactgggcgtctgtttcctgtttgcgccgaaatatcacaccggattccgtcacgcgatgccggttcgccaacagttaaaaacgcgaaccctgttcaacgtactcggcccgctgatcaacccggcgcatccgccgctggcgttgattggcgtctatagcccggaactggtgctgccgattgcggaaaccttacgggtactgggctatcagcgcgcggcggtggtacatagcggcggcatggatgaggtttcgctccatgcgccgacgattgtcgcggagctgcatgatggcgaaattaaaagctatcaacttacggcggaggattttggcctgacgccttaccatcaggatcagttggctggcggcacgccggaagaaaaccgtgacattctgacgcggttattacaaggtaaaggcgatgccgcgcatgaggccgccgtcgccgccaacgtggcgatgctgatgcgtctgcatggtcaggaagatctcaaggccaacgcgcaaaccgtgcttgatgttctgcgcaacggcaccgcatatgacagagtcaccgcactggcggcaagagggtaaataatgcaaaccgttttagcgaaaatcgtcgcagacaaggcgatttgggtagaagcccgcaaacagcaacagccgctggccagttttcaaaatgagatccagccaagtacacgccatttttatgatgcgctccagggcgcgcgtaccgcctttattctggagtgtaagaaagcatcgccatcaaaaggcgtgattcgcgacgatttcgatccggcgcgtattgccagtatttatcaacattacgcctcggcgatctcggtgctcaccgacgaaaaatattttcaggggagcttcgattttctgccggtcgttagccaaagcgcgccgcagccgattctgtgtaaggattttattatcgatccctatcagatctaccttgcccgttactatcaggccgatgcctgtttactgatgctctcggttctggatgacgaacagtatcgccaactctccgccgtcgcgcacagtctgaaaatgggcgtgctcacggaggtcagtaatgacgaagaacgggagcgcgcgatagcgttaggcgcaaaagtggtaggtatcaacaatcgcgatctgcgcgatctgtcgattgatttgaatcgcacccgccagctggcgccaaaactgggccacggcgtgactgtcatcagcgagtccgggattaacacctatggtcaggtacgcgaactgagccacttcgccaacggttttttaattggctccgcgttaatggcgcatgacgatcttaacgccgccgtccgtcgcgtgctgcttggcgaaaataaagtctgcggcctgacccgcgcccaggacgctaaagcggcctgtgacgctggcgcaatatatggcgggttgatttttgtgccctcatctccgcgcgcggttagcgttgagcaggcgcgagaagtgataagcggcgcgccattgcagtatgtcggcgttttcaagaacgctgatatcgccgatgtttgccagaaagccgccgtcctgtcgctttctgccgtacagctacatggcagcgaagaccaggcgtatgtcaacgcgctgcgcgaggcgttgccgaaacaggtgcaaatctggaaggcgctgagcgttagcgatgcccttcccgcacgcgattatcaccatgtcgataaatacattttcgacaatgggcaaggcggcagcgggcagcgcttcgactggtcactgctacaggggcaaccgctggataatgtgttactggcgggcgggctggcggccgataactgcgtccaggcggcgcaagtcggctgtgccggtctcgattttaattcaggtgtggagtcacagccgggcatcaaagatgctcgtcttctggcctcagtttttcagacactgcgcgcatattaaggaaaaaacatgacaacacttctcaacccctactttggtgaattcggcggcatgtatgtgccgcagatcctgatgcctgcgctgaaccagcttgaagaggccttcgtcagcgcgcaaaaagatcctgaatttcaggcgcaattcgccgatctgctaaaaaactacgcgggacgccccaccgcgctgacgaaatgccagaacattaccgccggtacgcgtaccacgttgtatttaaagcgcgaagatttactgcacggcggcgcgcacaaaaccaatcaggtactgggtcaggcgctgctggccaaacggatgggtaaaagcgagattatcgctgaaaccggcgccggtcagcacggcgtcgcctctgcgctcgccagcgccctgctgggtctgaaatgccgtatctatatgggcgccaaagacgttgagcgccagtcgccgaacgtcttccgtatgcgtctgatgggcgctgaggtcatcccggttcatagcggctccgctacgctaaaagatgcctgtaacgaggcgctgcgcgactggtccggtagttacgaaaccgcgcactatatgctcggcacggcggcaggaccgcatccctatcccaccatcgttcgcgagttccagcgcatgattggcgaagagacgaaagcgcaaatcctcgacaaagagggccgtctgccagatgccgttatcgcttgcgtcggtggcggctcaaacgctatcgggatgtttgccgattttattaatgataccagcgtcgggctaataggcgttgaacctggtggtcatggtattgaaaccggcgagcatggcgcgccgcttaaacatggtcgcgttggcatctatttcgggatgaaagcgccgatgatgcaaacagcagacgggcaaattgaagagtcctattccatttccgccgggctcgatttcccgtccgttgggccgcaacatgcgtacctgaacagcatcggacgcgcggattatgtctccattaccgatgatgaggcgctggaagccttcaaaacgttgtgccgccatgagggaattatcccggcgctggagtcctcccacgcgttggcgcacgctctgaaaatgatgcgcgagcagccggaaaaagagcaactgctggtggtcaatctctctggccgcggagataaagacatctttaccgtacacgatatcctgaaagcgcgaggggaaatctgatggaacgctacgaaaatttatttgcccaactcaacgatcgccgggaaggcgcttttgtccccttcgtgaccctgggcgaccctggcattgaacagtcactgaaaattattgacacactgattgacgctggcgccgacgctctggaactgggggttcccttctccgatccgctggccgatggccctaccatccagaatgcgaacttacgcgccttcgccgctggcgtcacgccggctcagtgttttgaaatgctggcgctgattcgtgaaaaacacccgaccattccgattggcctgctaatgtacgcgaatctggtgttcaataacggcatagatgcgttctatgcccgttgtgaacaggttggcgtagattccgtgctggtcgcagatgtcccggttgaagaatcggcccccttccgccaggcagcgttacggcataatatcgcgccgatcttcatctgcccgccaaatgcggatgacgatcttctgcgccaggtcgcatcttacggccgcggttacacctacctgctttcgcgttcgggtgtcaccggcgcggaaaaccgtggcgcattgccgttgcatcatctcattgagaagcttaaagagtaccatgccgcgcctgcgttacagggcttcggtatctcctcgccggaacaggtgtctgcggccgtgcgtgccggggcggctggcgctatctccggctcagccattgtcaagattatcgagaaaaacctcgcgtctcccaaacagatgttggcggagctcaggtcctttgtctcagccatgaaagccgccagccgcgcataacgggttaagccgtcagcataacgctggcggcttaatgagtggctggcgccgaaccagaatcacgattcagacgtacatcatcaatctttttggtgttattccccgtccagctttcaaaaagtctgaagtcaatttttgctaagaaaactcctaatcacgccgaaaaatttagcgttttcacgtcaatttcccccgcctttatgtaaagaaatgtcaacaaacaatgcattaacgtttccagggccgcagatagtgacgattgttattaataacaatgcaaagcatttcctgttaaatcgcttattctaaaagaaaatatagaatatattatctctaaaccattttttgtgcgttatttacgcggtaaatcacaactatttccgtcaatttgactaatcggtttaaccaactaattttaatagggtgtcgacacggttaaaaccgattttttcagcaagcaacgagacaggagaaataatatggccgaacatcgtggtggttcaggaaatttcgccgagaatcgtgaaaaagcatctgaagcgggccgcaaaggcggtcagcatagcggcgggaatttcaaaaacgatccgcaacgagcttctgaagccggtaaaaaaggtggtcagaatagtcacggcggacgtaaatccgataattcctgatttactgtaatgtaaatataacacatgcttttatcaagcaatctgcgagtcttctggctcgcagtattttgcccaggagaattagatttatgaatatcaaaaccgttgaagacctttttatccatctactttcagatacctatagtgcagaaaaacaattaaccaaggctcttcctaaacttgccagagccacgtccaatgaaaaattaagccaggcctttcaatctcatcttgaagaaacccagggtcagattgaacgtattgatcagatcgtcgaatctgaatctggcattaaactgaaaagaatgaaatgcgtcgctatggaagggctgattgaagaagccaatgaagtcatcgaaagtacggagaaaaacgaagtacgcgatgcagcgcttatcgccgcggcgcaaaaagtcgagcattacgaaatcgccagctacggcacgctagccaccctggccgagcagctcggctatagcaaagcattaaaactgctcaaagaaaccctcgacgaggaaaaacaaactgatttaaaacttaccgatttagcagtcagcaatgttaataaaagtgctgaacgcaaatcgaaataatatttttaattatcagcttgcatgattccgattttattatcggagcagattatcacgcattgaggaatgtaaaatgaattatactgaacattatcatgactggcttcgtgacgcccatgccatggaaaaacaggcagaatcgatgcttgaatctatggccagccgtattgaaaattatcctgatataaaagccagaattgaacaacatattagtgaaaccaaacatcaaattaccatgctcgaagaagtgttggaccgtaatggcatttcccgttcggtgttgaaagactccatgagtaaaatggcagcaatggggcaatctatcggtggcatgttcccttccgatgaaattgtcaaaggttcaattagcggttatgttttcgagcagttcgaaattgcttgttatacctccctgctggcggcggcaaaaaaagctggcgacactgcctcaattccgacgattgaagccattctgaaagaagaaatgcaaatggctgactggcttatcaaacatattccgcagacaacggaacaatttttactgcgatctgaagcagatggcgttgaagccaaaaaataaataataagcaggaggcaatatgtttcgacacgtaaaacaacttcaatatactgtgcgagtgagcgaacctaatcctggattagcgaacctgctgctggaacagtttggcggcccgcagggcgaactggcggccgcctgccgctacttcacgcaaggtttaagcgatgatgatgccggtcgtagagaaatgttaatggacatcgccaccgaggagctgagtcatctggaaattatcggctcactggtaggaatgcttaataaaggcgctaaaggcgagctggcggaaggtaccgaaaacgaagcggaactttatcgctcgctgacgcagaatggtaatgatagccatatcacctctctgctgtatggcggcggcccggcgttgacaaactccggcggcgtaccgtggaccgcggcttatattgatactatcggcgaagtcacagccgatctacgctcaaacatcgcggcagaggcgcgagcgaagatcatttatgaacgcctgattaatctgaccgacgatcctggcgtaaaagacacactcagtttcttaatgacccgtgaagtcgcgcaccagctctcttttgaaaaggcgctgtattcgattcgtaacaacttcccgccgggtaaattaccgccggtagaacagtataccgacgtgtactacaacatgtcgcaaggcgacgatccgcgaggtagctggaatagcgatgagaacttcaactatgtcgcagaaccgatgcctgctgttgatggcggcgatggcctggcgacagtgaaattgccgcgcgagcagatggcgctgctcaaagcgatggcagaaagaacgaaatcggaccccaccgttgatcctctcactggcgcagaactaggctgcggcgaaccgaaagaagacaagtgagttccgacaagtaaaatccgtgtgtcatgtccttttttgaccccgcctggcggggtcttttttcgtcacaacatcacgcgattagaaacgatagcctgccgagaacataaatacccatgggtccagacgcacgctgtcatgatgctgaacgccgcccattttataattggcggtagtatcaatatccatgtaccagacagaggcgccaattaaccagtcgcggttaatcaggtaatctaccccaacttgccctgccgcgccccaggaatccttaaagctcagatcggacagcccggcatttttaccattatcgttaaagtcgttatcgaagaaggtggtgtagttcacccccacgccgacataaggacgcactttgctgctggaatcgccgaagtaccactgcgccattaacgttggcggtaacaggtggaccgtggcgatatcgcccgtcgcgcccgtacccaccttatggcggaacggcgtagccgccagcaattcaaccccgatattgtccgtcgccatgtaagtgaatgtcaggccgagttgcgtgttattactcacatcaaacccgtttaaatgccccagcgtaccacccgccccttctgtaggtctgacggttgccggacctgcacgcataaagaattctccggcttcgtgcgcgaacgcgctgcctgagagaagagttgttaacgccagtgccgccactgtaaattttttcatacccgctccatcgttatggttataaaagcgtgatgaatatacccacaatgaagtaataagtgatctaatacagatcacatttgttcttataatttaacatttattgatccagattaatttagaacttgtattgaaaatcctggttataggaattcagatcaattttgacatattcacgctatgcaaatatttgtctgctcctgttgccctggcgataaaggctggctaaggtaatcaatgtcccgcaatggcgcgtggcgttaagattcgcgaacactgcgggacagattaatttccgttgtaatctattgatacgttagttttttgcaggtgaatcatgagcgttcttaacccatgcatgacatgcggtgcctgttgtgcctattttcgtgtctccttttattgggctgaaggcgacgatgccagcggacgcgttccggcgtcattaaccgagcctgttaccccttttttacgttgtatggccggtaccaaccaaaaacagccgcactgtaaagcgctaattggcacgccgggtgaaaacgtcagttgcgctatttatgaaaaccgcccttcaacctgtcgcgaattttcgatatcgggcgaaggaggcgaagtgaatgaggcgtgtaatcgcgcccgcgcgcgatacggattaccgccgctttacaaagatatgcttttccatacaactgctgatgctgccactgtagagttatccagggtacaattgcccgcaaattaacacctgcaaaactcaaggagagtgcatgtctatcacggcgaagtccgtttaccgtgacgccggaaattttttccgaaatcaatttattactatcttgctggtttcgttgctgtgcgcatttatcacggtggtcttaggtcatgccttttcacccagcgatgcgcaaatcgcgcaactcagtgaaggagaacatctggcaggcagcgctggcctgtttgagctggtacaaaatatgacgccggagcagcaacagatcctgttgcgcgcctctgccgcctcgacgttttccgggcttatcggcaacgctattctggccggcggtatcatcctgatgattcagttagtttcagcgggacatcgggttagcgcgctgcgcgctatcggcgccagcgcccctgcattgcctaaactgtttattcttatttttctgactaccctgttagtgcaaatcggtataatgctgattgtcgttccggggattattatggccattgtgctggcgcttgcgccagtgatgttggttgaagagaaaatgggcgtgtttgccgcaatgcgcagcagtatgcgtttagcctgggctaacatgagactggtcgcgcccgcggtgataggctggttactggctaaaacattgctattgctgttcgcgcccagcttcgctgtactgaccccaaatgtaggcgctgtactggcgaatacgttgagcaatctgatttccgcagtattgcttatctacttattccgcctgtatatgttgattcgccaataatccgcaatgcgccgttacgcggcgcattcgacgctcgttgatgatggaatcgaagaatgaagcagtttctggattttttaccgctggttgtcttttttgcgttttataaactttatgacatctatgcggcgacctccgcactgattgtcgcgacggcaatcgtgctgatttatagctgggtgcgctatcggaaaatagagaagatggcgctgattacctttgttctggttgccgtcttcggcggtctgacgctcttcttccataacgatgaatttattaaatggaaggtgacggttatttatgcgctgttcgccggcgcgctgttaataagccagtgggtgatgaaaaaaccgttaattcaacgtatgttaggtaaagaactggcgttgccgcagcaggtctggtcaaagctgaacctggcgtgggcgctgttttttattgcgtgcggtctggctaacatttatatcgccttctggttgccgcaaaatatctgggtcaactttaaggtctttggactcacggcgctgacgctcatttttaccctgctgagcggcgtctatatctaccggcatctgccacaggaagataaatcataaccctcccgtgacttatcatcgccagactgcgaacgcctggcgatattttctccgcctttacgccctgcgctttcccgtcagtacctttattcccactattctccacacaaaattcatagtagcatcgcggctgtaattttttctgatagtcggttttacaatgacaacaatggataatactcctcagggcgagctggttttacgtacattggccatgcctgccgataccaatgcgaacggcgatatttttggcggctggctgatgtcgcaaatggatattggcggcgcgatactggccaaagagatcgcgcacggtcgggttgtaaccgtacgcgtggaaggaatgacatttctgcgccccgtcgcggttggcgatgtcgtatgctgctacgcgcgctgcgttaaacgcggtacgacgtctattagcataaatattgaagtctgggtgaaaaaagtcgcgtcagaaccgattgggcagcgctacaaggccaccgaggcgctgtttatttatgttgccgtcgatccggacggtaaacctcgcccgctcccggttcagggttaagtatacccgcttacgccgccagcaggtgatggtatattcctggctggcggcgccagagattactcaatctgcgccgtaccgttcagacggaagataatattgaccaccagcccggaacccggcttgcctgcttcatagcgccattttcgcatcgcattcttaacttcacgctcaaacatattggctggctgcgcggatagaatctgtacattttccactcgcccagcagaggtcacgtcaaacttcacctttacgcggccttcaatacgtaacgcctgtgctcgcgccggatactgcggctggttacggctcagagcgcgaggtccagtgggcacgctcaccgcgggcttgctggtcgccgatgcggtgctgcttgttggccgcaccggggcgctattttcaaacggtgaggcaggacgcggcgcggctggtttgacttcgcgcttcggctgctcttcaacctttttcaccggtttcggttttggcttgggttttggcttaggtttgggtttctcaatcaccacgggcgcttctttaggcggttcagggatcggctctggctccggttcgggttcgggttcaaccaccggctccggcggcggctgaaccgcctggggcggctccaggtcagcgggtgaaaccattgtcaccgtgataggctgcgctggcgcaggcaattcaataacctgatgtaccgaggtatagagcaaacctgccactacagcaccatgaatgcctacggaaaggagtgtcggccagggaaagcgacgaggtaaatcaagggtcattgaagtcataatcgtttcagttgaaaaaccagagctgaattttaaatgcaaatagcaatcatattcaataaggcattgccgatagcggcatttaaaagatgatatcgcacaaaaacaccacacaaaatgtgcatgtttaacaaagtcggtatctttacattgcagttaaatgccctttccaataacgtaatcagcaacttttaccgattaaggagctctacccgtgctgtatgttatttacgctcaggacaatgccaactcgcttgaaaaacgcctctcggtacggcccgcgcatctggcgcgcctgcaacttctgcatgatgaagggcgattattaactgccgggccgatgcccgcagtggacagtaacgatcctggggtagccggatttaccgggtcaacggtgattgctgaatttgaatctttagaagcagcgcaatcctgggctgatgcggacccctacgtcgccgcgggcgtctatgcgcaggtttcggtcaaaccgtataagaagatcttttgaaaaggatggcctgttgggcaccgcatacggtgccctttctggctcacacaccgtgaatcgcaaagagtaatgaattacgctgacgattaaagatgcatttcctgatggtatggatacgcatattacggcgtgattgcccttcaagccaacgcgctttacggcggctcgcctgacgtagcattcgccagcgccccacttccgttctactacgcttcatgtttacgactctcactgtaacagaagcgccattataccccctcgccggatgcagaccagcgcttttcccgtgtttttatttgccatgtgaatcctgacgcgtaaactcttaacaacacgctttctaaaggatttttaaagttatgacaaccttctacaccgtggtgagttggctggtcattttgggatactgggttctcattgccggcgtcacattacgtattctaatgaaacggcgcgcagttccctccgcaatggcctggttgttaatcatctatatccttccgctggtcgggatcatcgcctatttgtccgtgggcgaattgcatttaggcaaacgtcgcgccgagcgtgcccgcgccatgtggccgtctaccgccaaatggttgaatgacctcaaagcctgcaaacacattttcgcgcaagaaaacagtagcgtcgcatcgtccttgtttaagctgtgcgaacgacgtcaggggattgcgggcgtcaaaggcaaccagttgcaattgcttaccgactccgatgatgtcatgcaggcgcttattcgcgatatccaactggcgcggcataatatcgaaatggtgttttacatctggcagccaggcggcatggcggatcaggtcgctgaatcgctaatggccgccgcccgccgcggcatccattgccggcttatgctggactccgcgggtagcgtcgctttcttccgcagcccctgggcggccatgatgcgtaacgctggcattgaagtcgtagaggcgctgaaggtgaatctgatgcgcgtctttttacgccgtatggatcttcgccagcaccgtaaaatggtgatgattgacaattacatcgcctataccggcagtatgaatatggtggacccgcgttttttcaaacaggatgccggcgttggacaatgggtcgatttgatggcgcggatggaggggcccgtggcgacagcaatggggattgtttactcctgcgattgggaaatcgagacgggtaaacgcattctgcctcccccgccggatgtgaatattatgccgtttgagcaggccagcgggcataccattcataccattgcttccggtcctggatttccggaagatctcattcaccaggcactattaaccgccacctatgctgcgcgcgaatatttaattatgaccacgccatatttcgtccccagcgacgatctgctgcacgctatttgtaccgctgcgcagcgcggcgtggatgtcagtattatcctgccccgtaaaaatgattcactgctcgtcggctgggccagtcgcgccttttttagcgagttactggcggcgggcgtgaaaatctatcagttcgaaggcgggctgttacataccaaaagcgtgctggtcgatggcgaactgagcctggtcggtaccgtgaatctcgacatgcgtagcctgtggcttaatttcgagattacgctggtcattgatgatacgggtttcggcgccgatctggctgcggtacaggacgattatatttcgcgctcccgcctgttagatgcacgtttgtgggtaaaacgtccgttatggcagcgtattaccgagcgattgttttacttctttagtccattgctgtaaaacgtgaccaacatgagtaaacaggtagtcactatggaaatggatctgaacaatcgcctgactgaagacgaaacgcttgagcaggcttacgatatttttcttgagctggcggcggataatcttgatccggctgatatcattctgttcaatttgcaattcgaggagcgcggcggcgcggagttgtttgatcccgctgaagactggcaagagcacatcgattttgacctgaatccagacttttttgccgaggtggtaattggcctggcggataccgaagacggcgaaattaacgacatttttgcccgcgttctgctgtgccgggaaaaggaccacaagctgtgccatattctctggcgcgaataagcggttcaggccggatggcgtctgattgcgccctccggcaagcctgtttaatccggtagcttactgccgcatcggttacaatattgcgcgctatgttcatgctggctttgctggcactgcggacattttcgctgccagtgacgtttttgaaacgcgctgctcatgtgcgtggtaatcagtcctgtaggaatcgcaatcaccgaatagccaatcaaaataagcaccgacgcgacaatacgtcccagcggcgtatgcggcgtaatatcaccgtaccccacggttgtgactgtcactatcgcccaatacaccgaggcattaagcgtcgtgaagccatatttcggtccttcaataagatacatcagggcaccgaaaataatcatcacgatcgcaataaatgaatagaacagaataagctgatgacgcgcgctaataatggcgctccagaatacccgcagcgatggcataaagcgtagcagtttaagaatacgcagcacgcgaatcgctcgcatagcgcgccaggcaaacatatagttcaggctaatttccggccacagccacatgacgtacagcggcaaaatcgtcaccagatcaataaatccccagaaactaaaaacgtattttgccggttcgggccagctaaacagtctgagcaagtattcaccggtaaatatcagggtaacgcagagctccagccagacaaaaatatgccattcatcaaatgtcaggtgatattccgttcctacgcctgattcaacaaaaatgaccagtacgctaagcagcgcaaacagcgcgcataacccttcaaaacggcgacctgagcgcgtagtcaaatcgaacagattatgataaagacgacggcgaaccgacgacaaagaaagtgacacggtaacctcacctaaaagaagggctgacgaattgtcagcccttgcgattataacgggtctactttaaggcaggaaacggcatggcgaaaactcccttccagcaccggtcgcgtttgcgcgcattctggcccggctatcggacagcgtgtacggaacacgcagccggaaggcgggttaatgggcgaaggtaattcgccctccagcaattgtatcttcttatttcgctccagatcgggatcgggaatcggtaccgccgacatcagcgctttggtataaggatgcagtggattatggtacacctcatcataggtgcccaattctactgcatgaccgagatacatcaccaggacacgatcggatatgtgctttacgaccgccagatcgtgcgcaataaaaatcaacgacagccccatctctcgctgtaactgctggagcaaattcaccacctgcgcctgaatagaaacgtccagcgccgacaccggctcatcgcaaataatgagcttaggttccaggatcaatgcccgggcgataccgatgcgctggcactgccccccggaaaattcatggggataacggttgatgaggttcggcaacagccccactttcagcatcatggctttcacgcggtcacgcacgtcctggcgcgaaagtttaggatgataagtgcgcagcggttcagcgataatttcgccaatcgtcattcgcgggttgagtgacgccagcgggtcctggaaaatcatctggatatcgctgcgcacctcgcgccactcatccgctttcatgcccagcagatcttttcccagccaggcgactttaccatctgtcgccttcaccagaccaataatcgcgcgcgcaaacgtcgacttgccgcagccggattcgcccaccacgcccagcgtttcgccttcatacaggcgtagcgtaacgccgtccaccgctttcagggttttcggcggttgccagaaccactgcttcccttctttgatatcaaaatgtactttcagatcggcgatttcgaggagaactttacgttgttcaatcacagcattcatagcagttcctccaccggtttaaaacaggcgcgcaagcgaccaggactaaacgcttcaagtggcggcgcattattgcagatctccatcgcatgaggacaacgcggctggaacggacaacctttaggcaaacgcaataaattgggaggattgcccggaatcgtcagcatttccgccccctcgctatccagacgcggcaccgcattaagcaggcctatcgaatacggatgaacgggctgataaaagacatcgcgcgccttaccgtattccatggtacgcccggcatacattaccaggaccttatcgcaaatacccgcgaccacgcccagatcgtgggtaatcatgataatggcggtattaaattcgcgctttagctcattaagcaaggtcataatctgcgcctgcacggtaacatcaagcgcggtggtaggctcatcggcaataagcagtttcggcctgcacaacagcgccatcgcaatcatcacacgttgacgcattccgccggaaaattcgtgcgggtacattttcatccgtttgcgcgcttccggcatttttacggcatccagcattctgacggactcttcaaaagcttccgctttgctcatccctttatgcagcatcaggacttccattaactgctccccaacgcgcatataaggatttagcgaggtcatcgggtcctgaaaaatcatcgaaatctgttctgcgcgcagcgtattcagttcgcgctcaggtagattaagaatttcacgtccgttgaaggtcgcggaaccgccgattcgaccattcgtcgccagcagtcccattaatgcgaacgccgtttgcgatttccccgatccagactcgccaacaatacctaacgtttctccagcgcgaagcgtaaagttcagatcgttgaccgccgtcacatcgccatcaggcgtagcgaacgtaacacgaagatcgtttacctccagcagtacattcgccggttgcggcgcctgagttgcggtttctgataagctcatggctgtactccttaacgatctttcgggtcgagggcatcacgcaggccatcgccaataaagttaaaacagaataacgtcaccacgagaaagccagccggaaacagcagcagccacggtgagacttccattgaatttgcgccatcgctcaataacgctccccaactgcttaacggttcctgcgtcccaagccccaggaaactgaggaaagactcaaacagaatcatgctgggcaccagcaacgatgcatacactaccactacgcccaggacgttaggcacaatatggcggatcacaatgctggcagtcgacacaccacccacctgcgcggcttcgatgaattctttacgtttaagacttagggtttggccacgcacgatacgcgccatatcaagccaggagaccatgccgatggcgacgaaaatcaacagaatgttctgcccaaaaaacgtcaccagcaaaatcacaaagaacataaacgggaacgagttgaggatctccaacaaacgcatcatcacagaatcaattttgccgcccagatagccggacagcgagccatacagcgttccgacaatgaccgccaccagcgcggcggcaatcccgaccattaatgagatacgcccgccgatggcaacgcgcaccaacagatcgcgcccggaagagtcagtgccgaaatagtgaccggacgccatatccggcgcactggacatcatgccccagtcggtatcgaaataggtaaattgcgacagcataggcgccactgtcacgaacagggctatcagaaacaggacaataagactggccaccgccgcacggttatgcataaagcgccgacgggcatcttgccaaaggctgcgaccttccacctccagcttttcactgaaattttccagcgtctcgctgtttttcttacttaacatcatcgcgagctccagtatcaatagcgaattttcgggtcgataacggcatagagcacatcgacaatggcgttaaataatatggtcagcgccccgactagaatggtcaaacttaacaccagcgagtaatcgcggttgagcgcgccattaacgaaaagctgcccaatgcccggtaagccataaatagtttcaatcaccattgagccggtaataatgccgacaaaggctggccccatataggataaaaccggcagcagcgcaggttttaacgcatggcggaagataattctgcgcatcggtaatccttttgcccgcgcggtacgaataaagttcgaatgcagaacttcaatcattgagccgcgcgtaatacgagcgatgctggcaatataggccagtgaaagcgcaaccatcggcaggatcataaattttaacgccccgccgttccagccgccgccaggcagccattgcaaggttatcgcaaagaccatcaccagtagcggcgccaccacaaaactggggataacgacgccggtcatggcaaatcccatcaccgtataatcccatcgcgtattttgctttagcgcggcaatcacgccagcgctgacaccaataatgaccgccagcaaaaaagcggcggcgccaagtttcgccgaaacggggaagctggcggcaaccagatcgttgaccgtgtaatctttatatttaaacgatggtccaaaatcgccatgcgccagctgcttcaggtagctgaagtactgcgtcatgatgggatcgttcagatgatattttgcttcaatattggccagcacttccggcggcaatgcgcgctcgccggtaaaaggactccccggcgcgaggcgcatcataaagaaagagatggtaataagaataaacagcgtcggaatcgcttccagacagcggcgtaaaataaatttcaacattgcccgtaccttctggcctgtgcctttacttcccggacgtgacaaaagatccgccagggaaagttatagtgcgatgaaaaaagacaccatgggacaaccgcagttgtcccatgtcttgccattaatgtttgataatatataagtttttcacataaatattatccagcgggtctttaccggtatacccgcccacccagggtttcaccaggcgcgcgttaacgtagtaatacaccggcacaatagccgagtctttatctaactgctgctccgctttagcgtagagttcgctgcgctgcgtatcgtccgccactttcagcgtgtcggcaatcagcttatcaaacgccgggctcttataatgcgcggtgttatttgaactgtcggacaacatggtattcaggaacgaggtcggttcattataatctgcgcaccacccggctctggcaacatcaaaggtgccctgatgacgggtatccaggaaggttttccattcctgattctccagattcacattgacgcccagatttttcttccagatagacgccacggcaatggccagttttttatgcagatcggaggtgttatacagcaggtcgaatgttaagggcttatccgccgtaaagccggcttcagccaacaatttcttcgcttcttcattacgcttttgctgggaccatttgaaccactcaggctctaccagttttgcgccatcggtatacggcggcgtgtagctataagcgggtaaatcgccctgatttttaaccttattaacaataatgtcgcgatctaacgccagtttcagcgcggtacgcacgcggacatcgttaaacggcgctttttgattattaatttcgtaataataggtacacaaataagggtctacgcggacttcattcgggatctctttcttcagtttctggaataattcgatcggcatattgttataagtcatatcgatctcgccgctgcggtagcggttgacatccgtcacctccgaagagataggcaaataagttacctgattgatgacggttttggcgttatcccagtattgcgggttacgctccagcacgatacgttcgttcaccacccagttttttaacttataagcgccgttagtgacaatattggccggttgcgtccatttatcgccaaatttttcgaccgctgatttcggtacaggagacactgaagggtggaccaacaatttgtagaaataaggcaccggctcacttaaggtcacttcaaaggtgtgatcatcaagcgcttttacccccagatcggtggcgggttttttaccggcgataatgtcatcgatattagcgatatgaccgtattgcagatagctggcgtacggcgatgccgtattaggatcggccaggcgttgccagctataaacgaaatcatgggcggtgacgggcgtaccatctgaccatttcgcattttcacgtagatggaatgtccagactttaaaatctttattttcccatttttccgcgacgcccggtgaaggatgcccctcgacatcactaattaataagccttcgaagaggtcacggctgacgttcgattccggcacgccttcaattttatgcgggtcgagagactgcacttctgatccgttattacgtaccaacgtttgcttgtcggctaactgaacgccggcgggcacgtctgccgcagtcgcggcgctggcggcgatgagcgcagtgagtattcccgctgcaatcaaactttttttcgtgatgttagacattgtgtttgtactccactcattataattactggtttttaccagcctgtttaatcccgtcagggttcctgtgcagcactggtggtgtactgccaggtctgtcactgcttttgctatcaccgactttatttattctgacgattcgttcgatcgcctttcgtcgattcggtatacgacgtacctgcccacgtcgcacgttatttctgacaaccatctaaatgaaaatacttatcaacaatgtgaaatcttctacaaaaatgtttggccgaaaagtatcaaatgcgtttctgaaccgccaattcattttacaattttgttaaccaattctcttttatggaaaaatccctgcccaaaaaaacagttaaacaatgttaaaaatctttgatttattctttataatcaataagttgaaagaaaaatatctctctgtcgcatcgtaggttatgcctgcgccagaaaacacacacaaatttaacaaatgctcattatttagcacattcatctacgatggagctgaaacaactaataacatttcaataatccttcatcaagccccagagtatggtgtgaataaaataacagacctaccgcctctcacggtctcagtaatgttgataatagtttgattaataaaaataaatagcgttagattatattagtattttttatcatttaaacgctgaatgcttatcaaagtaagaagtgttacgtgggaatgtcacaaggcggccccttagggcgccgcctgtaaatcagcaggtgggagtttagttgagcaagccggggaaaatgccttttattcctgtgacaataaattcgatgccgagcgccattaacaacaaccccatgattcgggtaataacgttgataccagtttgccccagcaaacgaaccagccacggcgccatacggaacacgccccagcagcaaagcgcaaaaagcgcaatggcaactgaaaagccaagcaaatgcgcgatgctgtgataacgcgtcccccagacgatagtggagctgatcgcccctggccccgccattaacggcagcgctaacggcacaacgccaatgctctcgcgtatggccgtctctgacttttcttgcttgttttgtttatcttcccccagcttcccgctgatcatcgacattgcaatggtgacaaccaggataccgcccgcaattctgaacgaatcaatagaaataccaaagagttgcaggatgccatcgccgaggaataaggaactccacaagataatcgcaaccgacagattcgcggtgaggttagttttattacgcgccgtggccgtctggtagctggtcatgctgatgaaaacggggataatccccaccgggttaaccagcgcaaagagcccgataaagaacttaaagtaaacaggaaaatcaaaaagcggttgaatcacggttagctccgaagcgttagccggatgaagtcaatgttcgttaatgatcaaaacgcgcagaagatacgccttttattcgcatagttcacctcttatctacgcctaatttcatccattcatcgctgttatttatatgtactcgttatgctaatccactcactcttcatgataacgatttcttaacaatttacataaaaggctaaaatggcctgctgaaaggtgtcagctttgcgtaatcttgatttagatcacacaatcgctactcagaagtgagtaatcttgcttacgccacctggacgtaacgcgttagagttaaatgatactaacgcagaagctcttttagtaaatcagagcgaaacggacgttaagtaaccacctgaatttcaggcatttatacaaagtatcgtcgatctgtctatactcacgtatcgcgcagatgatttactaaaaaagtttaacattatcaggagagcattatggctgttactaatgtcgctgaacttaacgcactcgtagagcgtgtaaaaaaagcccagcgtgaatatgccagtttcactcaagaacaggtcgacaaaatcttccgcgccgccgctctggctgccgctgatgcccgcattccgctggccaaaatggccgtcgccgaatccggtatgggtatcgtggaagacaaagtgattaaaaaccacttcgcttctgaatatatttacaacgcctataaagatgaaaaaacctgcggcgtgctgtctgaagacgacaccttcgggaccatcaccattgctgaacctatcggcattatttgcggtatcgttccaaccactaacccaacctctaccgcgatcttcaaatcgctgattagcctgaagacccgtaacgccatcatcttttctccgcatccgcgcgctaaagaagcaaccaacaaagcggcagacatcgttctgcaagcggctatcgctgccggcgcgccgaaagatctgattggctggatcgatcaaccttccgtagaactgtctaacgcgttgatgcaccacccggatattaacctgatcctcgccactggcggtccaggcatggttaaagctgcatacagctccggtaaaccggctatcggcgtaggcgcaggcaacactccggttgtcattgatgaaaccgctgatatcaaacgcgctgtggcgtctgttctgatgtctaaaaccttcgataacggcgtaatctgtgcttctgaacagtctgttgtcgttgttgattccgtctatgatgccgttcgcgaacgtttcgccagccatggcggctacatgctgcagggccaggagctgaaagcggttcaaaacgttatcctgaaaaatggcgctctgaacgccgctatcgtcggccagccagcctacaaaatcgctgaactggcaggcttctccgtaccagaaaccaccaagattctgatcggtgaagttacggtcgttgacgaaagcgaaccgttcgcacacgaaaaactgtctccgactctggcgatgtatcgtgcgaaagatttcgaagaagcggtagaaaaagcagaaaaactggtcgctatgggcggtatcggtcacacctcctgcctgtacactgaccaggataaccagccagaacgcgttgcttacttcggtcagatgatgaaaaccgcgcgtatcctgatcaacaccccggcctctcagggtggtatcggtgacctgtacaacttcaaactcgcaccttccctgacgttgggttgtggttcctggggtggtaactccatctctgaaaacgttggtccgaaacacctgatcaacaagaaaaccgttgctaagcgagctgaaaacatgttgtggcacaaacttccgaaatctatctacttccgccgtggctctctgcccatcgcgctggatgaagtgattactgatggccacaaacgtgcgctcatcgtgactgaccgcttcctgttcaacaacggctatgcagaccagatcacctctgtgctgaaagcggctggcgttgaaaccgaagtcttcttcgaagttgaagcagacccgacgctttccgttgttcgcaaaggcgctgagctggctaactccttcaaaccggacgtgatcatcgcgctgggcggcggttccccgatggacgccgcgaaaatcatgtgggtcatgtacgaacatccggaaactcacttcgaagaactggcgctgcgctttatggacatccgtaaacgtatctacaagttcccgaaaatgggcgtgaaagcgaaaatgatcgccgtcaccaccacttccggtaccggttctgaagtcacaccgtttgcggttgtgaccgacgatgcaaccggtcagaaatatccgctggctgactacgccctgaccccggatatggcgattgtcgacgccaacctggtgatggatatgccgaagtccctgtgtgcgttcggtggtctggatgcggtaactcacgctctggaagcttatgtttccgtactggcttctgagttctctgacggtcaggctctgcaggctctgaaactgctgaaagaaaacctgccggcgtcttaccacgaaggttccaagaacccggttgcgcgtgaacgtgttcacagcgccgcgactatcgccggtatcgcgtttgccaacgccttcctcggtgtatgtcactccatggcgcacaaactgggctctcagttccacattccgcacggtctggcgaacgccctgctgatttgtaacgttatccgctacaacgcgaatgacaacccgaccaagcagaccgctttcagccagtacgatcgtccgcaggcacgccgtcgttacgctgaaattgctgaccacctgggcctgagcgcgccgggcgaccgtaccgctgctaagattgaaaaactgctggcatggctggaaagcattaaagctgagctgggtattcctaagtctatccgtgaagcaggcgtacaggaagctgacttcctggcacacgttgacaaactgtctgaagatgccttcgatgaccagtgcaccggcgctaacccgcgttatccactgatctccgaactgaaacagattctgctggatacctactacggtcgtgatttcaccgaaggtgaagttgcagcgaagaaagacgtcgttgccgcaccgaaagcagagaaaaaagcgaaaaaatccgcttaattcgttatctgttttagcatgacaataacggcctcaattgaggccgtttttttgttttacctgtttatctgatgcctgaaggcgctatgctgatcatctggcctacgtgctcacggcacgcccttcgtcaggaggcctgaataatgacctccaaagcgctacagggcgttttataagccgctctttacctcaggtatcatatgtgccgatgacgctcctgaatcgccgtcagtgagccctcctccagcgcgtccttataatgcttacggcaaactgaaacgtagcgttcattcccgccaataaccacctgttcgccttcgttataaggcctgccgtcctgatcaaggcgcagaaccatactggctttacgaccgcagaaacagatagtttttaattccaccagcttatctgaccatgccagcaagtattggctgccgacaaagagctccccacgaaagtctgttcgtagcccatagcaaagtactggaatatctaatttgtcgacaacctcggataattgataaacctgctggcgagtcaaaaactggctttcgtcgactaacacgcaatgtattgtctgccgcgcgctctcggcacgaatctcttcaaacaaggatgtattttggttaaacaattttgccggcgacgacaaaccgatacgagagctgactttgcctgcgccgaaacgatcgtcgatttccgccgtatatacgacggtacgcatcccgcgttcctgataattgtatgaagattgcagcagtgcagtcgacttacccgcattcattgccgaatagtagaaatatagctgtgccattggtcgcaggacctcacctgagtgaaataaagattggcgggattgtaccataatttaccgacgcgacggcgcggctcgcgctccggtgagtattaagaattgtacaaacatcgctcactatacccaaaataattcgcgttgcttaaaggcggcaagggagtgagtccccaggagcatagataactatgtgactggggtgagcgagcgtagccaacacataagcaacttgaagtatgaagggtatatacacattccttcacaaattatgccgttaaaattcatcaacaatgcttatcatcacccgccaatatgaaaaccttgtacttattgttaccgttactcatacccggtgcaaagtaatagggttttcttgtaaggaaagctaatacaagagattgatatctctgcaatgagatcgtatttcatcatgataaaatgtgacctgactcctaaatttttagcgacagacggtgagtatcccccctgccaataagctcttttttgtgcggtgcctcaaggaaaatttaagttgagataattaaaacgtgtgcttaataaagcgtaattttgaattccttacattcctggctattgcacaactgaatttatcgctctattattagctcaacaaaccaccccaatataagtttgagattactacaatgagcgaagcacttaaaattctgaacaacatccgtactcttcgtgcgcaggcaagagaatgtactctggaaacgcttgaagaaatgctggaaaaattagaagttgtcgttaatgagcgtcgtgaagaagaaagcgctgctgctgctgaagtggaagaacgcactcgtaaactgcaacagtatcgtgaaatgttaattgccgacggcattgacccgaatgaactgctgaatagcatggctgccgctaaatccggtaccaaagctaaacgcgcagctcgtccggctaaatatagctatgttgacgaaaacggtgaaactaaaacctggactggccagggtcgtacaccggctgtaatcaaaaaagcaatggaagaacaaggtaagcaactggaagatttcctgatcaaggaataatttacttcctggatgcttaaaatcccgccgctggcgggattttttttgcctgagttctccgctgacgaccccaggcataaaaaaagcgccggatttaccagcgcttctgttaaaaaatttataacgtatcgttacttcttaatacccatttcttcttcaagccaggctttaaattcagcacccagcgaattatgacggatgccatattcaacgaatgcctgcatatatcctaacttattaccacagtcatggcttttacccttcatgtggtaggcttcaaccgtttctttttcgatcagcatatcgatagcatcggtcaactgaatttcatccccggcgcccggaggggttttcgccagcaacgcccagatatccgcgctcaacacataacgcccgacaatcgcaaggttagacggcgcgacatccgcttttggtttttcaaccacgccaaccatcggcacactttcgcccggcgccagctcaacgcctttacaatcgaccacgccgtatgcagtcacatcttctaccggctcaaccataatctggctattgccggtttcgtcaaaacggcggatcatttcagccaggttatcctgagacaggtcggactcatattcgtcaagaataacgtctggcagaataacagcgacaggttcgtttccgacaacgggatgcgcgcacaatacggcatggcccaggccttttgccagcccttgacgtacctgcataatagtgacatgcggagggcaaatagactgaacctcctccagaagctgacgcttaacgcgtttttccagcatcgcttccagctcaaaactggtatcaaagtggttttcaatagagtttttagacgagtgcgtaacaagcacgatttcagtaatgccagcagcgatacattcgttcacgacgtactgaattaatggcttatcaaccagcggcagcatctctttcgggatagctttggtcgctggcagcatcctggttcccaatcccgcgaccgggataacggcttttttgactttcgaattaagggcagccatttaaaattctcctggactgttcatgtattgaacgtgttcattaatctgtatcgtgttccagtatatcagtaccagaacaagcctcaggtccaaaaaggacttatattggtataattaagacaaatacttataaatctgccgcagatagtaacactcgtcgggaaaggccggtaaagcaatttccgctcactcttccgtttggtcattccgcagacaacatcaatcgcagacgccctcctgcgccccatatttgacactgccacgagtcgcaacgctggcttaattggttaaggtaggcgttacccaatgttcctagcggcacgccgctgctaatttgaacctgatgagcgcccgtatttaaggtggcgttcaatccggcggagacgagaatcaaatttttgagctcactgtgatagtagccgacaaatagcgggaattgcccaggtaaattggcttgtctgagcagatgatttacctgttttaatagcgcgcctaactccggtaaacggtgcttttgttggcctagctgatcctgcaataagccgttaaatagcgcccgcagcaacaatgcggctaacacgccgttatcgcccgcccgggtgacatccaggcaataaaatgccagttcgttatcagatagcggcgcaatatccagcaccagtccaggctgatcggcggagacgagctgccggtaattaatgcggcaatgagaaatcacctgctgtaccgggggctgcaattcctgcaacaattgcgctgcggcggtcggattactcaccattgcatcccagtcacgaaacaggcgttcttcttcttcaacccgcgagttaaacatattagggtataagcaagcgaatacggtttcccgcaagcggttgagatcttttaccggcttcagcaagacatcttcaaccccaaggcgcaacgctttggcgatatccgccatattttctgttgcggaaataaccagaataggcgtctggtctccgcgattacgtaagttttctaccagtttgagaccgttcattctcggcatagcgatatcacatatcatgagatcaggggtaaaacgccccatcaactccagggcatccaccccgtcgcctgccaatgccgttgtcgctcccaaagaggaaaaccacgaatccagaagcgagcgaaatacaggctcgtcttcaacaataagaatctgttttccgaccaatggctgcgtcatgttctctcccctgactggctttaatcaatagtggcatggtattgccgcttgcgcctgtcagaatttgcttaagtgatcgtaaaaggtacattaaacgtcggtacgcaccaagggtataagttcgtccatctttttctctacggctaactgacccgccgcaatagcggcatgggcgcgatgaaaatccagcgtagagatttgcggacagaatggttgaatgagaatatcaggcggatcgccagccatacggttacgtttaagacgattttccaacacctggatggaggttgtcatgatttccattgccccaggcgaactcacgccacggcgtgaagtcaggctactgaaacgttcttttaaacgcttatgccagggcagcgcatcatcgctctcttcattgatattcccgacatttacagagagcaaatcttgctgcatgaggtgggcatcatgttgcaggtctaccgcaataacgatatcagcccccagcgccctggttaacgaaacaggtaccggattaacgactgcgccatctaccagccagtaaccgttatgttcaaccggagacatcagccctggcatactgcacgacgcgcgtacagcaaggtgtagatcgccttcagtaaaccatagctctcgtcccgtgctaagattcgtcgcgaccgcgccaaaacgtcttgaacagtggtcaaaatccgtgacgggcataatatcccgatagtgattaaatacgcgttcgccgcgaagcaaccctcctctgccccaggatacatccatcaggcgtaaaacatcccagtagcggaatgaacatacccactgttcaagcgccgataatttattacaggcatacgcggcgccgaccagtgaacctattgagcatcctgcaacgatatcaatatcaatgcctgcttgcttgagggctttgatgaccccaatatgagaccatcctctcgctgcgccagatcccagcgccagccctattttcatttttctcatcgtacttaacgacttcccctggcttcaagacgtagcaacatcgccactgctcagttaacataatgccaccctggcgttcaacgccgttttttatattcagggagattattgtgtctcagccttgtccctgtggtagcgctgacgagtatagcctatgttgtggtcgtattgtgtccggagaacgagtagcacccgatccgtcacatctcatgcgctctcgttactgcgcttttgtgatgaaagacgcagattacttaattaagagctggcatccaacctgcaatgcggccgcgtttcgtgatgatatcatcgccggatttgccaataccaggtggctcggcctgactatttttgaacatacctggtcagaagcagaaaatacagggtatgttagttttatcgcgcgtttttccgaacaagggaaaaacggggcgattatcgaacgttctcgttttatcaaagaaaacggtcagtggtattatattgacggtacccgcccgcagttgggtcgaaatgatccctgcccgtgcggttcaggcaaaaaatttaaaaagtgctgcggccagtgacgcctgacagtatcgatacagcaaacactctcaacaggatttttccggcaatgcaatcactacaacgtaaagttctgcgtactatttgtcccgatcaaaaaggccttatcgcgcggattaccaacatttgctataagcatgagcttaatattgtgcaaaacaatgaatttgttgaccatcgcaccggacgcttttttatgcggaccgagctggaaggcatcttcaatgattccactcttctggccgatctggacagcgccttaccggaaggctctgttcgtgaactcaatcccgccggacgccgtcgggtagtgattctggttaccaaagaggcgcattgtctgggcgacctgctgatgaaagccaactatggcgggctggatgttgaaatcgccgcggtcattggcaaccatgaaacgttacgctcgctggttgaacgttttgagatccctttcgaactggtcagccatgagggattaacgcgtgaagagcatgacacgaagatggcggacgccattgatgcccatcaaccggactatgtggtgctggccaagtatatgcgtgttttgacgccaggttttgtggcgcgcttcccgaacaaaattatcaatatccaccactcattcctgccggcgtttatcggcgcgcgtccttatcatcaggcctatgagcgcggcgtgaaaatcatcggcgctaccgcgcactatgtgaatgataatctggatgaaggcccaatcattatgcaggacgtgattcatgtcgatcacacttacaccgcagaagatatgatgcgtgccgggcgcgacgttgagaaaaacgtattaagccgcgcgctgtatcaggttctggcacagcgagtctttgtttacggcaatcggacgattattctttaatcgtcagtaatatgaattgattagctttaatccgttacggatgaaaagtacgcaaacagttcatttcaggcaaaggaatgctttacagcggcgtgtcatttgatatgatgcgccccgcttcccaaaaggaagcgggccagtattaagcattaccccgtggtggggttcccgagcggccaaagggagcagactgtaaatctgccgtcatcgacttcgaaggttcgaatccttcccccaccaccattattcactacagcgatgtagttaactcgatgagcaatgcagaagtttgcacttgtcggggaagggtgagaaccttcgattaaggttcgactcgagcgaaagaacgttgccaacggtaacggcccgtagggtgaggagtgaagcgacgaataatccttcctccaccaccatcttcaagctttacctacaatttgaattacccctggtggggttcccgagcggccaaagggagcagactgtaaatctgccgtcatcgacttcgaaggttcgaatccttcccccaccaccatcgcttccgtcgcgtatcttatccccgttaagcatagtgtctcatatctctctgtacgggaaggatgagaagcttctaccagggttcgattcgagcgcagcgagaaagcgttgccgcaggcaacgacccgaagggcgaagcgcgcagcgctgagtcatccttcccccaccaccatcactcccgtcgcgtatcttatccccgttaagcacactgtctcatatctctccgtacgggaaggatgagaagcttcgactaaggttcgattcgagcgcagcgagaacgcgttgccgcaggcaacgacccgaagggcgaagcgcgcagcgctgagtcatccttcccccaccaccatcactcccgtcgcgtatcttatccccgctaagcacagtgccttatatctctctgtacgggaaggatgagaagcttcgactaaggttcgattcgagcgtcagcgagaaagcgttgccgcaggcaacgacccgaagggcgaagcgcgcagcgctgagtcatccttcccccaccaccatcactcccgtcgcgtatcttatccccgttaagcacagtgtctcatatctctctgtacgggaaggatgagaagcttcgaccaaggttcgattcgagcgcagcgagaaagcgttgccgcaggcaacgacccgaagggcgaagcgcgcagcgctgagtcatccttcccccaccaccataatctcccggcagcgcctcaatcaatcttcatcgcccccacaggcagacttcactccatggcgccatggcttattggttatcttatcaatacttcttcctggcaatctttttcgcctcctttgactgatcaatttttcgccagatgagattaaaggcggcatatgtctcgctaagttgatctggggtgagcgttcccttgagtcggtttctttcggcaatgagcgctgaacaatcatccttagatttttccgtatacatacttgccatgtaataccaaatataggcctgcttattatctttaggcacaccctggcgcccatgagcataaatttccccaagcgctgattgtgccggagtaaacccctgctctgccgctttgaggtaccacttcagcgcattccggctattttcaggcacgcctcttcccgtgctatatgctacgccaagctgatattgcgctttcgcaaaatcctgttttgctgcttttcgataccatgcgatagcctgtctgtcgctttgcgcgacgccgcgaccaaatgcagacatgatgcccagatgcgtttgcgcagcaggcagcccctggcgagcggctttgcgataccacgccagcgcctgttggtagtcctgagaaacgccctcaccctgcataaacatcacgccgatcgcatcctgcgcctcggccaatccttgcgctgcggctctgcgataccactccagcgccaggttgtgatctttcaataagtgataaccgttgtaataccatacgccaaaattgtactgtacctttgccatcacgcgttgcgctgtttttcgataccacgtctgagagtgaacccggtcagcgggatgcgctttatcatagagcgcattcagcggaatgtggcctggcgtatagctgcctggtataccttcattaagccagtaaactgcctgacgataatcctgaggcacgccttcaccataaaaataggcaacgccgagataaagttgcgcggggtagtacatattttccgccgctttacgcatcaagatcgccgtttgctgataatcctgaggaacgccctgaccgtgggcgtacattactccaagcttaaattgtgctgacgaagctgaaccctgtccgcggacaacgcccgcatcattggttggagaggcggcttttcgataccactccagcgctagctgggtattttggggaaacccatcgccatacatataggcgtcaccgaggatttcttgcgtactactatcccctagctctgccgccttgcgataccactccagcgctttttgtcgactaagtggaaaattttcaccatagttgtaatgatagccaaggatgaaataggaaaaatcagaaccttgtttacccgctttctccagccattttatggctagtttataatcaggcttaacgtatcgcccctccgcataccagcttccaagcgagaactgcgcgctttcatctccttgttccgctttttgctctaattcctgaacgtactggcattcttctgagtcggcgggatagcgctcctcgcagacagcagcgtgagccatttttgaaataaatatatttaatattattattttgaaaattgatgaaaaacgcatacaactatccttattgtcgtttatggcgtgattatatgctgcatcatcatttttctgcttacaaaaaactcgcacagatgctgaataaacccaaaaacaaagagtacggattcagatgccagacatggcagacccgctgtaaacgaaacaaggcggcggtcgataaggcatttatgccgcactccggcaaacagccataaaaaaactccgccgaagcggagtttagggcatcgagagaaaatcagtgacgtgcacgaacaatctggtatttgcgggtcagatactcgaccggcacgctccagatatgcaccaggcgcgagaatgggaacaacaggaacagcgtcatccccagtaccaggtgcatacggaagataaaggctacaccatccagatgtgcggatgcgccaccgtggaaggtcacaactgactgcgcccacccgaccagcttcatcatttcactcccgtccatatgctgggcggagaacggaatggtcagcaggcccagcgcgcactgaatcaccagcagcgagagaatcaaaatatctgcgccggtagtggtggcgcggacacgtgggctaaacagacgacgcttgagcagtaaaataccgccaaccagcgtcagcacgccgcaggcgccgccggcaatcatcgccatcttctgcttcacgtcgaccggcagaaaagcttcatacatccagtgcggcgttaacatgcccaggaagtgaccggcgaaaatacccagaatcccaatgtggaacaggtttgacgccaggttcattcctttgcgatccagcatctgactggaagccgcccgccaggtgtactggccgtagtcgtaacgtaaccaactaccgatcagaaataccgatccggcaatgtacgggtagatatcaaagaagaacatattcaggaagtgcattagtgctgtcctccggtggtgatattcagatattgcggcgccacggccccggcaaaacgacgctggtgagcggagatttccgactcgccacacccttgatcggcgaagaatttcacctgctcttcttcccagaccgcatccaacgcctgcggggtatcatcacgtgcttcattcgcaattttttcagccactttatcgctgtcgataacggtattcgccagttttaacagcagatcgaacagcaccgcataacggctgtcacgctgttgcaaacgtgcgctgagcagcgccagaatcggcgcgatatcctgtaaaccccctaacgcttcgcttttcggcaattgcgcaaggtattccagatacagcggcagatgatcgggaagttcgcgactgtcgagctgcaaaccgtgctgctcatactgtgccatcaggtcaaccatcgcctgaccgcgatcgcgggattccccgtgtacatgttcaaacagcagcagcgatgtggcgcgaccacggtcaaacagttcgctataagcggcctgtacatccagcaggtcctgcgcggttaaatcgcgcaggaaaacgcccagagtctgggcatcctctttatccaggttctcagatgacgcgagcgcatcgaacaactcctgctgatgctgccacagggcagcatccgggtactcgagcagacgcgaaacaatgacgagttcaatcatgcgtgcggctccgttttgctggtcacatcaacagcgtcgatgcggcggctgttgaacagattgaatttggtatcagacccgtggcaaccatcgccgaaggtaaagccacaaccgcttttctccgggaatgcgtcacgcgccagttcacgatggctgctcggcaccacaaagcgatcttcataattagcaattgccaggtaacgatacatttcctgcgcctgggcttcgcttaaacccacctcttccagcgcgcgggtatccactttaccgtctacggtttccgcacgtttgtagtgacgcatcgccagcatccgtttcagcgccaacagtaccggctgggtgtcgccagcagtcaacaggttcgccaggtactgcaccgggatacgcagactgtctacatccggcagaataccgttgctgccaagttcgcccgcatcggcggcagactgaatcggtgacaaaggcggtacgtaccagaccatcggtagcgtgcggtattccggatgcagcggcagcgccagcttccagtcaatcgccattttgtacactggcgattgctgcgccgcatcgatcacgctctgcggcacgccgtccttcagcgcctgctcaatgacagccggatcgtttggatcgaggaacacgtccagttgacgctggtacagatctttttcgttttccgtactggcggcgctttcaatggcatcggcgtcatacagcagtacgccaagataacggatacgacccacgcaggtttccgagcaaacagtcggctgaccagcttcgatacgcgggtagcagaagatgcacttctcggacttgccgctcttccagttgaagtaaatcttcttgtacgggcagccggtgatgcacatccgccagccgcggcacttgtcctggtcgatcagcacgatgccatcttcttcacgcttgtagatagcaccgctcgggcaggtcgccacgcacgccgggttgagacagtgctcgcacaggcgcggcaggtacatcatgaaggtgttttcgaactggccgtacatcgccttctgcatgttttcaaagttctggtctttagcgcgtttttcgaactcgccgcccagaatctcttcccagtttggcccgctggtaattttgtccatccgctggccggtaatcagcgagcgcggacgcgcgatcggctgatgtttgctttccggcgcggtatgcaggttctggtagtcgtaatcaaacggctcgtagtagtcgtcgatgcccggcagatgcgggttagcgaagattttacccagcagcagcgcccggttgcccatgcgcggctgtagcttgccgttaattttgcggatccagccgcctttccatttttcctgattttcccagtcattcggaaaaccaacgccaggcttactttctacgttgttgaaccaggcgtattccataccttcgcgactggtccagacgtttttacaggtgactgaacaggtatgacagccgatgcacttatcgagattcagcaccatgccgacttgtgaacgaattttcattttacgctctcctgtacctggtcattgccttcgccatccaaccagttaatgttcttcatcttacgtaccaccacaaactcatcgcggttggagccgacggtaccgtagtagttaaagccgtaggctaactgcgcatagccgccgatcatatgggtcggtttcggcgtaatgcgcgtcaccgagttatgaataccgccgcgctgctgggtaatttccgaccccggcaggtttacgatacgttcctgcgcgtggtacatcatggtcatgcccgccggtacacgctggctgaccactgcgcgtgcggtcaatgcgccgttgctgttgaagacttcgatccagtcgttatcttcaatgcccagatctttggcgtcggtttcgctcatccatacaatcgggccgccacgcgacaaggtcagcatcaacagattatcgctgtaggtcgagtggataccccatttctggtgcggcgtcaggaagttgagcgccttctccggattaccgttggatttacgccccatcaccgctttcaccgagcgggtgtcgatcggtgggcgatacaccagcaaactttcgccgaagtcgcgcatccactggtgatcctgatacaactgttggcgaccagacagcgtacgccatgggatcagctcgtgaacgttggtataaccggcgttataagaaacgtgctcatcttccagaccagaccaggtcgggctggagataattttgcgcggctgggcctgaatatcgcggaagcggattttctcttcttctttattggttgccagatgcgtatggtcgcgaccggtaaactcgctcagcgccgcccaggctttcaccgccacctgaccgttggtttccggcgctaacgtcaggatcatctctgccgcgtcaatcgccgtgttgagcatcggctggcctttcgccggaccgtccgctttggtgtaattaagcttacgcagcaagtccatttcgctctgcgtgttccaggcaatccctttcccgccgttgccgattttctccatcagcgggccgatagaggtaaagcgttcgtaagtcgccgggtaatcgcgctcaacggtcatgatgtgcggcgcggttttccctggaatcagatcgcattcgccttttttccagtctttcacgtccagcggctgcgccagttcagcggcagaatcgtgctggatcggcagcgtcacgacgtcagtctctttacccaggtggcctacacagacttcggagaatttcttcgcaatgcctttgtagatttcccagtcgcttttcgattcccaggccggatctacggcggcagacagcggatgaataaacggatgcatatccgaggtattcatatcgtctttttcataccaggtggcggtcggcagtacgatatcggagtacaggcaggtgctcgacaggcggaagtccagcgtcaccaccagatccagtttgccgtccagaccattgtcacgccactccacttcttccggcttcacaccgccctgtttacccagatccagcccctgaataccatgctcagtacccagcagatacttcagcatgtactcatggcctttaccggaagacccaagcaggttagaacgccagatgaacaggttacgcgggtggtttttaccgttttccggctgctcggcggcaaagcgaatcgaaccctctttcagggatttgacggtatagtctaccggcgtcataccggctttttccgcttcacgcgcaatatacagcgggttagtgcctaactgcggcgccgacggcaaccagcccatacgttcggcgcgcacattgaagtcaatcagatggccgctatagcgggatttgtccgccatcggcgacagtaattcctcggcggtcaccgtctcgtagcgccactggctggagtggttatagaagtaagaggtgctattcatgtgacgcgccggacgctgccagtcaagggcaaacgccagcggctgccagccggtctgcggacgcagtttttcctggccgacgtagtgcgcccagccgccgccgctctgaccaacgcaaccacagaacaccaacatattgatcagcccgcgatagttcatatcgaggtgataccagtggttcagaccggcgccaacgataatcattgaacgcccgtgcgttttgtccgcgttatcggcgaactcccgtgcgatacggatgatctgcgcccgcggcacgccggtgatctgctcggcccatgctggcgtatacgctttggtatcatcataactggcggcacaattttcatcgttcaggccgcgttccagaccatagttcgccatggtcaggtcatacacggtggtgactaacgctgaagaaccatcggccagttgcagacgttttgccggcagtttatgcagcaggacgttatccagcgccacatgattaaagtactctgaaccctcgccgccgaaatacgggaagcccacgtcagcaatctcatcctggctgcccagcaagctgagctgcaattcagtttctgcaccggtagtcccgtcgcgctgttcgaggttccatttgcctttttcgccccagcggaaaccaattgaaccgtttggcgctaccatttcaccgttgctgttgatagcgacggttttccattccgggttattttcctgccccagcgaatcaacgagatcggcagcgcgcagcatacgacctgcggcataataaccatcacgctcttcaagcatcaccagcattggcatgtcggtatagcgacggacataatcggtgaagtactggcgcgggttgtcgaggtggaactcgcgcagcatgacgtggcccatcgccagcgccatcgccgcatcggtcccctgcttcggcgccagccacagatcgcacagtttggcgatttcagcatagtccggcgtcaccgcgacggttttagtgcctttgtaacgtacttcggtaaagaagtgggcgtccggcgtacgggtttgcggcacgttagagccccaggcgataatatagctggagttgtaccagtcagcggattccggcacgtcggtctgctcgccccaggtttgcggggaggctggcggcaggtcgcagtaccagtcgtagaagctcaggcaggtaccgccaatcagcgaaagataacgtgcgccggaagcgtaggaaaccatcgacatcgccgggatgggtgagaagcccgcgacgcggtcagggccataggttttcacggtgtacacgttggaggcggcgatcagctcgttcacttcctgccatgaggagcgaacaaagccgccacgaccacgcgcctgtttgaagcttttggctttatcggcatcttcaatgatggaggcccatgcctctaccggatcgcgatgcagttttttcgcctcgcgccacatcttcatcagacgtttgcgcattagcggatatttcagtcggttagcgctgtagagataccaggagtagcttgccccgcgcgggcagccgcgaggttcatggtttggcatgtcaggacgggtgcgcgggtaatcggtttgctgtgtttcccaggtcaccagaccatttttgacataaattttccagctacaagaaccggtgcagttcaccccatgggttgagcgcacaattttgtcatgctgccaacgttggcggtatccgtcctcccagtcccggtttgtttcgagaagctggccgtgcccatcggcaaaggtttcgcccttctgcttgaagtagcgaaaccggtccaggaatttactcatcgggtttctcctgtgtggaaccttacggctctctgataaatcgacattgcttaactaagggcgaaggtaacgcgctgaatgggcgtgagaattgataacgatcaaggcggacagggatgcaaatggcgcgcaaacctcctgcatactcctttgggaggaggagttttatttatatatattactgatttaattacataaaattaaatttacgcacgacatgaatgttaaattttcaacaagtgggtattaaggggtatccccctggatgaccgataaagatgtgcgtggttagccctgccgcgtctctcttcttgattataagtatgttgtaactaaatacagataaaaaaaagcgcggtctaacgccgcgcaaaggataatcaaaagttactttttatttttagaatgacgtccatataccgcccaggtaataacgacgcaggcgatatagaaaataagaaagactttcatcgcgccgactggagaaccggttaatgctaaagatgaaccaaacgctttcggaataaaaaagccgccaatcgcgccaatcgcggaaataaagcccagcgccgccgccgtatcagttgccgcttcacgcatggctctttcttccgacccgccttccgcttttacccggtccattgtcagtttacggaagataacggagatcatctggaaggtagaaccactccccaacccagccgtcaggaacagcgccagaaataccccgtagaacgcgataaagctaccgccaacgccgccagtaggtaatgtcaggaacagcagaccgctgaaaatcgccatcaggacaaagttgataagcgtgacgcgagtcccccccagacggtcagaaattgcgccgcctgccgaacgcgccagcgcgccgataaacggaccgaaaaacgcataatgcaggatctgcacatccgggaattgcgttttagacagcatcgcgaaccccgcggagaaaccgataaacgatccgaaggtcgccagatacagcagactcatgatccacagatgaccacgtttgagcaccggcagttgctcttttagcgaggccttagacgtcgccagttcgttcatgccgaaccacgccgccagcgtaaaaatggccaggaaaggcacccaaatccaggccgcgttcgccagatagagctgagaaccgtccggctgctctacaccgtggctgccaaaggcggcaaagatagagagcgaaaccaccagcggcgcaaccagttgcatcacgctcacgcccatattgcccagaccaccgttcagacccagcgcgccgccctgcttttgtttaggaaagaaaaagctgatgttcgccatactggaggcaaagttcgcgccggcaaaaccacacagcaaggaaataataatgaaggtgctaaatggcgtactggtatcctgaacggcaaagcctaaccatacgcagggcacgatgaggataccggtactgaacgctgtccagcgacgtccgccaaatagcggcaccataaaggagtaaggcacccgtagcagcgcgccggaaacagatggcagcgcagtcaacataaagagctgatcggtcgtaaaattaaatcccactttcggcaggttcaccgccactgcgctgaatagcatccagacgcaaaacgccagcagtaaacacggcacagaaatccacaaattacggctggcgacacgatggccgcgctgctgccagaatgccggatcttccggacgccattccgtgataacagcgccagttgccctttccggggcggataagtgactcatagacacctctgattcttgatttgatgtctgccacattagggtttactgccgaaggtaagttgatataaatcaaaggaaaagtcgtcatcaccggcgactaaaaatagttattacccttaatgagtaggctattttggtaaaaaagctgtggtttttcaccatgctgtgtctgtctactccttcccgtcgcagatacctctctacagcggcaattaaggagtaactcgttataggtatgggtatactccgctgtatcgttgagaatagcggcacagccgattgacgcccctcttttttgctacgttttttcggcgacattaccccgaagaaagaaggtaacatgtttaaacggtgtttctctcctcttacgctggttaaccaactggcgctgattgtcatgctctctaccgctatcggcgtggcggggatggcggtttccggctggctggttcagggtgtgcagggtagcgctcatgcgattaataaagcgggctcattgcgtatgcaaagctatcgactactggcagctgtcccgctggatgctaaagatcaaaagctgctggatgagatggagcaaacggcattcagccctgaactgacccgcgccgctgagcgagacgggcagcagaagcagcttaaagcgttgcaggattactggcataacgaactctcgccagggctacagcacgcgcaaaacgcgcacgcggtcgcagaagatgtcacgcgctttgtggcgggcctggatcgcctggtgacgtcgttcgaccatacgactgaattgcgtatcgaacgcgtggtattagttcaccgggtaatggcgatctttatggcgctattgctggtatttacgattatctggctacgtgttcgccttttgcagccctggaaacagttgttatcaatggcgcgcgccgtcagtcagcgcgactttacccaacgtgccaatatcagtggacgcaatgagatggccgcgttgggttctgcgctcaataatatgtctgaagaactggccgaaagttatgcggtactggaacagcgcgtacaggaaaaaacagccggtctggaacataaaaaccagattctctcgtttttgtggcaagccaaccgccgactgcattcacaggctccgctatgtgagcgtctttcaccggtactgaatggcctgcaaaatttaacccagttgcatgatattgagctgcgggtctatgacctggaagatgaagataatcaccaggaatttacctgtcagtcggacatcagttgcgatgataaaggctgccacctttgcccacgtagcgccctgccgatgattaacggcggcaccaccttaaaatggcggctcaccgactctcacacccaatacggtattttgctggcgacgctgccctatggacgccatctcagccacgatcaacaacagttggtggacacgctggttgaacagcttaccgcgactctggcgctcgacaggcatcaggagcgccagcagcagttgattgtcatggaagagcgtgccaccattgcccgcgaactgcatgattctattgcccagtcgctctcttgtatgaagatgcaggtgagctgcctgcaaatgcagggcgacgtgttaccggaaagcagccgtgagttactcagccaaattcgcaatgagctaaactgctcctgggcgcaactgcgcgaactgttaaccactttccggttacagttgacggaacccgggctacgtccggcgctggaggcaagctgccaggagttcagcgcccggtttggctttacggtaaaactggattatcagcttcccccccgcctggtgccttcacaccaggcgatacacctgttgcaaattgccagggaagccctcagcaacgcccttaaacactctcatgccgacgatgtggtggtgacagtgacgcaatgtggcaaacaggtcaaactaaaagtgcaggataatggctgcggcgtcccggaaaacgccgaacgcagtaatcactacggcatgatcatcatgcgcgatcgggcgcaaagtttgcgcggcgattgccaggtacgccgacgcgagactggcggaacagaggtcactgttacttttattccagaaacaaacttcacagaaacccagggagatacccatgaataatcaggaaccggcaaccatcctgttaatcgatgaccatccgatgctacgcacgggtgtaaagcagcttgtgagtatggcgcccgatatcagcgtggtcggagaagccagcaacggtgagcagggtattgacctggcggaatcgctcgatcccgatctgatcctccttgatttgaatatgccgggaatgaatggtctcgaaacgctggataaattacgcgaaaaagcgctgtcaggacgtattgtcgttttcagcgtatccaaccatgaagaagatgtcgtcacggcgctaaagcgcggcgcggacggttatctgttgaaagacatggagccggaggacttgctcaaagcgttacaacaggccgccgccggcgaaatggtattaagtgaagcgttaacgccggtactggcggccagcctgcgggccaaccgcgccaccaccgatcgcgatgtaacgcaactcaccccgcgtgagcgcgatattctgaagctcatcgcgcagggattgccgaataagatgattgcccggcgtctggatatcaccgaaagtacggtcaaagtgcacgtgaaacatatgctcaagaaaatgaagctgaaatcgcgcgtggaggccgccgtctgggtacatcaggaacgcatcttttaattattgctcctggaacggttgccaatgcggattatcgtccggcatcgtgataaacggttcagtcagcgcgagcgtgatctcattggaagagacacgctgacctttttcatcctcaaccaccaccgataaacgccagcgatttgccgcgccttcgcggtgatcccaggccggcataatgattgtccagccctcggtactgcgggtgtccgttcctgccgtcaaacttaatgcctgtgtatcgccctgccagctcaaatgacgaataccgtgcacgctgcgcacctgcaattttaacgcaaccgtctcaccaggcgtaagatcccagggcggcgtcgccagaaaaaccgttaacgttttacgctgccgatactccattgtcggcagcgagttacgttgcggcgtatcatagcggctaccgcgtaatgactggctttgcgccacttcactggcggcaagctgctttttgagcggcacgccgaagcggtagttaagcgtcagccccaggttattttgactgaccccgctctcgccctgtttgtgctgggcggtcatggtaagcaaaggtactggcgtatagttgagacccagttttaacgcgacaggattgtgataccccgttccggagtcaaacagatccacgctatcgccaaagtactgctccagactaacgctggtattgatatgctggtaaaacggcaggcgcatttgcgcgttgatatcatatccgcgcgccattcgctgttctaaggtcgccgtatgcgtctgccagtcggcaaaaggctgataatagttggcggataaacgcaaatattctccccacgcctccgcgccaaagccggcgcgctgtagattttcatccagcagattatcgtaaaaggtattatagccaagaagccagccatcctgcgcccagcgctgtcctacgccaatgttgcttaccagtccgtcagtctgttgcgtaagaccaagctggctccaggtcagatagcgctgtttatcctgtaaagggataaaccagcttccgcgactgccgttaaaatgaccttcgttatcgacgttaatatccacgctggcgctgccccaggctgatagccagctttcaagctgctggttaacctgctcgctgaccacatcgcgtacctgtccgaaagcgaattgccgcgcctgttcaccagtatccagatcgttatttttcatgctggcttcgccaaacgctttggccatctcggcaaaatgcttttccccttcgtgggattccggcatcatgcctaaatccggcagacggttttgcgtgaaaggatcttgcgcctgcgcacggatcgtaccgctggcagccagcaagagaagcgagagtgagaatgaacgaaaaacaatacggctcaacgtgtcggcaacttctacaacaaaagataagaggaatgacatcagagtaaaccataacgtgtccggacaggttttgcagccttttctcgtgcttccaggaatatccttattttttccgcagagcgtcccgggattttatccacgcatttggcggtacccggttcccgaggtaacataacgccattgccgacaaaatttctcaaggagaagggttatccatgcaaaatatcgtcattatcgctaacggcgccgcctacggcagcgaatcattatttaatagcctgcgtctggccattgcgctgcgcgagcaggaaagccatctcgatttacgcctgtttttgatgtcagatgccgtaaccgcagggttacgcggtcaaaaaccagccgaaggctacaatattcagcaaatgctggaaattctgaccgcgcaaaacgtaccggtaaaattatgcaaaacctgtgcggacggacgtggtatcactcccctgccgctgattgacggtgtggaaatcggaacgctggtcgagctggcgcaatggacgctggcagcggacaaagtgctgacattttgaatctgtacgcgggaaaagctcccgcgtcaggatagacttccggcaagaaaatcaggctaacacgcgagtaataccgcgtttattttttcttatgccatttatcatcctcgcctttttcataatcgtttttaaccgtcgcccaggcgactttgtgtgcggtttcctcgcggctggcgtcatcacgacgatcggctttatctttatattgctcccaggcgctattaaacgcttctttgtaaatgtcctgggcatgggctggaagaacattccgcacattatcgggtaaatcacttttggctttatacggcatcagcgcctccgtcttcagggaaaacattaagtgtggtaaacaatgcgttattacgccagtcgaggaggatttttgctttttacggaaattaactttttgttatttaaacactgttaaaacaagatgcttgttttactgaccttgaaagaaaaaaatcgtctacgccgtaaaactacgtaaaaaaccactaaaaaaatacaaatttctgctatttttaccttctttactctttccaaaatattaacacctgcacaagggagaccctcatgacacatgcctgtgaggcggtgaaaacccgccataaggagacttcgcttattttcccggttcttgcgctggtagtgctgttcctttggggaagcagccagtcactaccagtggttattggcatcaatatccttgcacttattggtattttaagcagcgcatttagcgtggtccgtcatgccgatgtattagcgcatcgactcggcgaaccctatggatcgcttattttaagcctgtccgtcgttattcttgaggtgagtttaatttccgcgctgatggctaccggcgatgctgcgccaacgcttatgcgcgatacgctctactctattattatgattgtcaccgggggactggtcggtttctcgttgttgttgggcgggcgtaaattcgcaacgcaatatatgaatttatttgggattaagcagtatcttatcgcgctgtttccgctagcgattattgtgctggtttttccaatggcattgccgcaagccaatttctctaccggtcaggcattattggtcgcgttaatttccgccgcgatgtacggcgtatttttgttgattcaaaccaaaacgcaccagagcttatttatctatgaacatgaagatgaaggcgatgatgacaatccacaccacggtaaaccctccgcgcacagtagcggctggcatacggtctggttactcattcatttaattgcggtcattgccgttaccaaaatgaatgccagcccgctggaggcgttgctgaccagcatgaacgccccggtcgcctttaccggtttcctggtcgcgctgttaattctctcgccggaaggactgggcgcgctgaaggcggtactgaataatcaggttcagcgggcaatgaatctgttcttcggatcggtgttggcgacgatttcattaaccgtgccggtcgtcacgctcatcgcctgggcgacaggtaatgatctggtgtttggtttaggcgcgccggaaatggtagtgatggtggcctcgttagtgctgtgccatatttcgttctctaccggacgcaccaacgtgctaaacggcgcggcgcatctggctttatttgccgcctatctgatgacgatttttgcctgatataaaaaagccggatagtatcttatccggcctacacaagctaaaaaccgcaatcagttctcggtatccagctcgtcgaagcttttcaccaaatcatcaatcgcttttatctgggtcaggaactgctccagtttcgccagcggcagcgcggaaggaccgtcgcacttcgcgttagccgggtccggatgcgactccaggaacaggcccgccagaccgacagccataccggcgcgcgccagctcggtcacctgaccacgacgaccgccagaggcggcgccaaatgggtcgcggcattgcagcgcgtgggtgacgtcgaaaatcactggcgagttgccggagacctttttcatcacgctaaagcccagcatatccaccaccaggttgtcatagccgaagttcgcgccgcggtcgcacagaatcaccttatcgttaccgccctcatggaacttatccacaatattgcccatctgacccgggcttacgaactgcggctttttcacgttaatcacagcgccggttttcgccatcgcttccaccaggtcggtctggcgcgccagaaacgccgggagctgaatcacgtcaaccacatcagcaacaggctgcgcctggctggcttcatggacgtcagtgatcacttttacgccaaatgtctgcttgagttcctggaagattttcatcccttcttccagacccggcccacggtaagagtgaatagaggaacggttggctttatcaaaagaggccttgaacacgtaaggaatacccagcttctgggtaacggttacgtagtgctcacaaatgcgcattgccagatcgcgtgactccagcacgttcataccgccaaacagcacaaacggcaggtcatttgccaccttaatgtcgccaatgttaaccactttttgtttcataggatcgccttacacttataggtaaaatgtcggttaattaatgtagaacaatttgcttgtgcgcaatggtgttgatctgcgcacgaatcatttcgctgatcgggtcttccggacactgttcaacgaagtagcttaaatcagtcagcgcaacgtgttcacactcaagctgcgcgtagatcaacccgcggtcacggatttcgtaaggatcttccgggttaaattgcaacaatgcttcgctaacgcgcagcgccagctccatttgccgttcctccatcagcgaggatttcagcgtatccagtagcttacgaatcacttcggcgttatccgcttcgtccaaatcttcattaaacaactcggcgaccggactaatattgccttttaaccagacttccagagtatgttcatcaagcgtttcaccgttgaacgggttaatcagccacatttccccttccagcgattcaatacgcaaaatcaactgcgttgggaagataacgggcaccaacggcaaatcaagacggtttgctatccataataaaatagcgcccaacgataccgcgctcccctggcgttttttcaggactttatcgagccataaagcatcagaaagacggtagacgccgcgggaatccgtgaacccccactcgccgtaaaaaagtgccagcaatttttccagttgctcatcctgagacaggagctggctaatttcttcctgcgccagactgaccagacgttccagttcgtcgtagacaaactgcgtgggaaaatccaggcgaatcatctctgatgccaggatcatgccatcacacagcggcgcattgttaaattcgaaatcagctaacgacctcatgacttaccccagtaacggtatttttgtggtggcgagtttaatgatgatgtacagcaccaccagcgccagcgggaaagcgataaaacgcgcctgctggctgcgcgcctgacgataatcaagcgcaataaaacccaaaacgatgtagatgataacgccaaacagtttttcagtcagccatgagcccgactccgtgaatggcaggatgtgcgttttaacgattaacccaataccgctaagcagtaacagggtatctatgacgggaggcacgattcgtgtccagcgcgcggcggccaacgcatggccgcaatagcgccaccagtaacgagcgacaaacaaactgacggagagcgcaacacagataagatgaagcgtgagcaacattgcaattgtcatggcgtaaaacgtccgcaggtcacgcgttcattaccaccataatcacgacacgtttctacatccgagtaaccagaccgcctgaaaaccgctcttaccgcttcgccctgctgccaaccgtgttccagcagcaggaagccgccgggcgttaacatctggcgggcgttatcgataatatgcgtaagatccgccataccgttttcgtccgccaccaacgctgagcgcggttcaaagcgtacatcgccttcgctaaggtgcgggtcctgcgcgtcaatgtagggcggattgctgacaatcatgtcgaactgctgccccgatagcgcgctgaaccaacaactttgcagtatacgcacattccggatagccaaatgttccgcgttgcgtatcgccagcgcaaccgcatcaggcatacgatcgaccgcagtcacctcgcaatccggtcgctcgcaggccagcgccagcgcaatcgcgccggttccggtgcctaaatccagaatacgacaggtttttaccggcaatcgcgccaacgcctgttccaccagacattcggtatccgggcgcgggattagcgtggcgggagaaacgaagagcggcagcgaccagaattcgcgtaagcccgtcaggtacgcaataggttcgccctgtttacgccgctgcagcaggtccgcgagctgttgttgctggacgtcggtaagcggcgtttcgccaaaggccatgatatacgtccgccccttgcccgtaacgtactctagcaggatctcggcgtcgcgccgggggctgtcgctgtcccggagctggtttaccgcctcatgcagccagtgctgaaaatccattattcctgctcggataaggcggctaacaggtcagcctggtgttcctgaacaatcggctcaatcagcatatccagcttaccttccatcgtttcatcaaggcgatataacgtcagattaatacgatgatcggtcacgcgcccctgcgggaaattataggtccggttacgatcgctgcgatcgccgctgccaagcagattgcgtcgcgttgacgcctcggcctgctggcgttttgccgtttcggcggcgtgaatgcgcgccccgagcaccgagagcgctttcgctttgtttttatgctgcgaacgctcgtcctggcattccaccacgatgccggtcggcaagtgggtaatacggatagcggagtcggtggtgttaacgtgctgaccgcccgcgccggaagaacgaaacgtatcaatgcgcagatccgccgggttaatatccggcagctcggcttccggcagctccggcatcacggcgacggtacaggcggaggtatggatacgcccctgcgactcggtcgccggaacacgctgtacgcggtgtccgccggactcaaatttcagtcggccatacacgccgtcgccgctgattttggcgatgatctctttataaccgccatgctcgccttcgctcatgctcatgatctccacgcgccagcggcgcgcttcggcataacgactgtacatgcggaacagatcgccggcaaacagcgcggcttcgtcgccgccggtaccggcgcgaacctcaaggaacgcgtttcgttcatcgtccggatctttcggcagcagcagtacctgtaactgttgctccagttgttcgcttttttctttcgcttcgcgcagttcttcctgcgccatttctcgcatttcaggatcgtcgagcatcatctgagccgtctcgatatcgtcctgaacctgttgccagtccgtaaaacagcgagaaacgtcgcttaattgcgcatattcgcgcgacaatgcgcgaaagcggtcctggtcggcgataattcccgcatcgcccagcaacgcctgaacttcctcatggcgttcgtgcagggcttccagtttggcaacgatagaaggcttcataggcgtaaattcaccctgtaaaaaagtgtggtgtgtgctgctactccagcccgaggctgtcgcgcagaatattcaggcgttcgtcatccccgtcacgggcagcctgttgaagtgatttcgttggcgcatgaatcaggcggttggtcagtttccatgccagatcctgcaagatggcttgcgcatcaccgccctgttgaagggccgacagcgctttggtagtcagttcgtcacgaatctgctccgactgactacggtattcccgaatggtctcgctggccccctgggcgcgtagccaggccataaactcgctggcttcctgctcaacaatcgtttccgcttctactgccgcagcctgacgctgcgccagattatgcgaaatgatgctctgtaaatcatcgacgctataaagataagcgttcgccagtttgccgacttccggttcaacgtcgcgcggtacggcaatatccaccagcagcatcggctggttgcgacggctttttaatgcgcgctccaccatgcctttaccgataatcggcagcgggctggcggtcgaactgataataatatcggcatcctgcaaacgggcgtcgatatcgctgagcgagataacctcagcgcctacctcatccgccagggcttgcgcgcgctcgcgggttcggttggcgataatcatcttttgtactttatgctcgcgcaggtgacgcgccaccagttcaatggtttcgcccgcgccaactaacagtacggtgaccgtcgagagcgattcaaagatttggcgggcgagcgtacaggcggcaaacgcgacggagacggcgctagcgccgatatcggtttcagtccgcactcgcttagcgacggaaaaagacttctgaaacattcgctccagcgcgctggcgttaaggtggcctttttgcgaatccgcaaacgcttttttcacctgaccgaggatttgcggttcgcccagcaccagtgaatccagaccgctggcgacgcgcatcaggtggctgacggcgtcattgtcctgatgccagtacagactgttgcgcagatcgtcctcgttcaggttatggtaatcgcataaccagcggatcagcgcttcttgcaggttatcctgctcttccacgctcagatacagctctgtacggttacaggttgacagcacgaccccgccctgcaccattggctgcgcaagcaggctgtccagcgcctgatcaagcgtgtccggcgaaaacgttacgcgttctcgcagcgatacaggtgccgttttatggttaataccgagcgctaaaagggtcatgtctgcgggagtagtaccagcgttgatatggttagtctgcttgcatcatacaggatgcgcgtggtcaataaaagagagagcccccttttggagtaattggcagcgctcgctaatttgatgatttaagacaacttgaaagtagacgatgtcaccaggcggcgctagcattaaaggctataactgtaaccgatagcaaaaatttgccgaatcgcggcgcgaacgtttttacagcctgcaggttcagttttcaggcctgataagcgtaacgccatcaggcaattattgcaccgtatcacaaggattcgtcatcactatgaccctgcccgattttcgcctgattcgtctactgccgttagcaagcctggttctcaccgcctgtacgcttcctgggcataaaggcccgggcaagagcccggattcccctcagtggcgccagcatcagcaagaggtgcgtcatctgaatcaataccagacgcgcggcgcctttgcttacatctcagatgatcagaaagtctatgcgcgtttcttctggcaacagaccggacaggatcgctatcgcctgctgctcaccaatccgctgggcagcaccgagctggagcttaacgcccagccgggcaacgttcagttggtggataacaaaggccagcgttataccgccgatgacgccgaagagatgatcggcaaactcaccgggatgccgattccgttaaacagcctgcggcagtggatcctcggtctgcctggcgatgccaccgactacaaactggacgaccagtatcgcctgagcgaagtgaactatcgccaggatggtaaaaactggaaagtggtttacggtggctatgacagcaaaacgcagcctgccatgcctgccaatatggagctttcagacggcagtcagcgcattaagctgaaaatggataactggattgtgaaatgatgacccattggccttctccggcaaaattaaatctgtttttatatatcaccggacagcgagcagacggctaccacacgctgcagacgctgtttcagtttctggattatggcgacacactccacatcgaaccgcgtcacgatggcgaaatccatttattaacgccggttaacggcgttgaaaatgaagacaatctgatcgtccgtgccgcgcggctgttgatgaaagtcgcctcggagagtgggcgcctgcccgccggaagcggtgcggatatcagcattgagaagcgccttcccatgggcggcggtctgggcggcggctcatctaacgccgcgaccgttctggtggcgctcaatcatctttggcaatgcgggctttccattgatgaactggcgacgctcggcctgacgctcggcgccgacgtcccggtctttgttcgtggccacgccgcgtttgccgaaggcgtaggcgaaatattaacgccggtgaatccgccggaaaaatggtatctggtcgcgcaccctggcgtaagcattcccacaccggttatctttaaagatcctcaattgccgcgtaatacgccaaaaaggtcaatagatacgttactaaaatgtgaattcagcaatgattgcgaggttatcgcaagaaaacgttttcgcgaggttgatgcggcgctttcctggctgttagaatacgcgccgtcgcgcctgactgggacaggggcctgtgtctttgctgaattcgatacagagtcttgtgctcgccaggtgcttgagcaagccccggaatggctcaatgcttttgtggcgaagggtgtcaacctctccccattgcatcgagagttactctaacgcattcgggtttcaggaagatggcgaaatgacgagtcgccggtcatatatgccgtatttgaccggtgtgaggcatcgataccagcgcacatgaaacgtgaatgaagacgagtaagccgggcaagctgagcttcggtgacaacgtcaccttgttccagacgttgcatcgcgctctttaatacaccgcctggataggattttgcctggcccgcacagttttcggcagattctttccaccaatggacgcatgcctgaggttcttctcgtgcctgatatgaagctttttgctggtaacgctaccccggaactagcacaacgtattgccaaccgcctgtacacttctctcggcgacgccgccgtaggtcgctttagcgacggcgaagtcagcgtacaaatcaacgaaaatgtacgcggtggtgatattttcatcatccagtccacttgtgccccaaccaacgacaacctgatggaattggtcgttatggttgatgccctgcgtcgtgcttccgcaggtcgtatcaccgccgttatcccctactttggctatgcacgtcaggaccgtcgcgtacgttccgcccgtgtgccgattaccgcaaaagttgtcgctgacttcctgtccagcgtcggcgttgaccgcgttctcaccgtagatctgcatgctgaacagatccagggcttctttgacgttccggttgataacgtgttcggtagcccaatcctgctcgaagatatgctgcaactgaatctggataacccgatcgtggtttccccggatattggcggcgtggttcgtgcccgcgctatcgctaagctgctgaacgataccgatatggctatcattgataaacgtcgtccgcgcgcgaacgtttctcaggtgatgcacatcatcggcgacgtcgctggccgtgactgcgtgctggttgatgatatgatcgataccggcggtactctgtgcaaagcagcagaagcattgaaagaacgtggcgctaaacgcgtgtttgcctacgcgacgcacccgatcttctcaggcaatgcggcaaacaacctgcgcaactccgtcattgatgaagtcgttgtctgcgacaccattccgctgaccgacgaaatcaaagcgctgccgaacgtgcgtaccttgaccctgtcaggtatgctggccgaagcgattcgccgtatcagcaacgaagaatcgatttccgccatgttcgagcattgatcgaacccggatctgaaacccgctgcggcgggtttttttgtctgtaacacccttttgtatgacttatgcctccttcacctgccatttagttgacagatgatgcgctcatggatgaaacattattgtgaacaaattattttcctcacatgtgatgcctttccgcgctctcatcgatgcttgctggaaagaaaaatataccgcctcccggttcacccgtgatgtgatagccgggatcaccgtcgggattattgctatcccgctggcgatggcgctggcaattggcagtggcgttgcgccgcagtatggcctctatacctccgctgtcgccgggatcgtgatcgcgctaaccggcggctcgcgctttagcgtttccggccctaccgccgcgtttgtggtgattttgtatccggtatcgcaacagtttggtctggcgggcctactggtcgccacgctgatgtcgggcttcttcctgatccttttcggcctggcgagactggggcgattgattgaatatatcccggtgtcggtcacgttgggttttacctcagggattggtattaccatcggtaccatgcagattaaagattttcttggtctgcagatggcccatgtgccagagcactatttgcagaaagtcggcgcgctgtttatggcgttgcccaccgtcaatattggcgatgccgccattggcgtggtaacgctgggaacgttgattttctggccgcgtctcggtattcgtctgccaggacatcttcccgcgctgctggctggttgcgccgtgatggggatcgttaatctgctgggcggcaatgtggcgactatcggctcacagttccattatgttctggctgacggcactcagggcaacggcatcccgcagctcctgccgcaactgatgctgccgtggagtcttcctggctccgatttcacgctaagctgggattcactgcgcgcgctgctgccagcggccttctcgatggcaatgctgggggcaatcgaatcattgctctgcgccgtcgtgctggacggcatgaccggcaccaaacataaagctaacagcgaacttatcggccaggggctggggaatatggtcgcgccgttctttggcggcatcaccgccaccgccgcgattgcccgctctgccgccaacgtccgcgctggcgcgacctctcccatctcggcggtaattcacgctatcctggtcattctggcgctactggtcttggccccgctactctcctggctgccgctttccgcgatggcggcgctactgctgatggtggcatggaatatgagtgaagcccataaagtggtggatctgttacgccatgcgccgaaagacgacattatcgttatgctgctgtgcatgtcattaacggttctgtttgatatggtcatcgccatcagcgtggggattgtccttgcttccctgctgtttatgcgccgtattgcgcgtatgactagacttgcgccggtcaatgtcgatgtgcctgatgatgtgctggtgctgcgtgttatcggtccgctctttttcgccgcggcggaagggctgtttaccgaccttgagtcacgtattaagggcaaacgtatcgtcgttctgaaatgggacgcagtaccagtgctggatgcaggcgggcttgatgcttttcagcgttttgtgaagcgtctgccggaaggttgcgaattgcgtatcagtaacctggagttccaaccgctgcgcacaatggcgcgtgccggtatcaaacctattcctgggcgtctgaccttcttcccgaacaggacggaggcgttagcggatttactcagttaatggacaatgcccggtggcgataacgcttaccgggcctgaaccggttagctatgacgacgattgtcgttacggcggcaacgtttgtcatagtgacgtacccaccaatatttgtcgctcacctgctcatgcccccctacacgagcccccgccagccaaagaactgcaccgacaaaaatgctcagtattgcgccatgcgcaaaaaattgcggcaaattaaactgcggcagttggtttaaaatagagtaacccacgccgacaaccatcacgaccagccccaaccccatcagcacgttaccgaataacgaagcgtttttgcgtttcatatgtcacctccggaacttttgggttgtttttaggaaatccccctaaactttatgtgtaaagtatagacaacactttcgtttgtaagtgcgggtgcgatcacaaatgtaaagtttcatttaacaaaactttacaaataacacactgaacagtttacatttttaataatcaatgctggcaattatttaatttacttcagagtgtcgctgtgttttgtcaagcgggcagacagacagtaaactacgcgccagttatggatctactcaggacaaaaaacgtggcaattaaattgattgttggtctggcgaatcccggtgcggaatatgccgcgacgcgacacaatgcaggcgcatggtacgtcgatttactggcggagcgcctgcgcgcgccgttgcgtgaagagcctaaattctttggctatacctcacgcatcacgctggaaggggaagatgttcgcctgctggtacccaccacgttcatgaacctcagtggtaaagcagttggcgcaatggccagtttttaccgtattcagccggacgaaattttggtcgctcacgacgagctggatctccctccgggcgtcgcgaaatttaaacttggcggcggccacggcggccacaatggtctgaaagacatcatcagcaagctgggcaataatcccaactttcaccgattacgcgttggaattggtcatccaggcgataaaaataaagttgttggtttcgtgctgggtaaaccccctgtttctgaacaaaaattaattgatgaggccattgacgaagcggcacgctgtacggaattgtggttcaaagagggtctggccaaagcaacaagccgtttgcatacctttaaggcgcaataaccagtgatgtgcggcatttttgccgcacgccgtgtataataggcgaagttatttccatttctgcaatctgttttctataacaggttgattattaagatattaaggtgagttaaatcatgggattcaaatgcggtatcgtcggtctgcccaacgtcgggaaatccaccctgttcaacgcgctgacaaaagccggtattgaagcggcaaactttccgttctgcactatcgaaccgaataccggtgtcgtgccgatgcccgatccgcgtctggaccagttggctgagattgttaaaccgcaacgcattctaccaaccacgatggagttcgtggatatcgccggtctggtaaaaggcgcgtccaaaggcgaagggttgggtaaccagttcctgaccaatatccgtgaaactgaagctatcggtcacgtggttcgctgctttgagaacgacaatatcatccatgtggcgggtaaagtaaacccggtagaagatattgatgttatcaataccgaactggcgctggctgacctcgatacctgcgagcgcgctatccatcgcgtacagaagaaagccaaaggcggcgataaagacgccaaagcggaactggccgcgctggaaaaatgcctgccgcacctggccgaagcggggatgctgcgttcgctggacctgacggacgaagataaagcggctatccgttatttaagcttcctgacgctgaagccgacaatgtatatcgctaacgtcaatgaagacggttttgaaaataacccgtatctggaccaggttcgcgaaatcgccgccaaagaaggttcggtcgtggttccggtgtgtgccgccgtcgaagctgatattgctgagctggatgatgacgagcgcgacgaatttatggctgaactgggtctggaagagccggggctgaaccgcgttattcgcgctggttatcgcctgctgaacctccagacctacttcaccgccggggtgaaagaggttcgcgcatggactattccggttggcgcaaccgcgccgcaggcagcaggtaaaatccataccgacttcgaaaaaggctttatccgcgcccaaactatcgcttttgacgactttattacctataaaggtgaacaaggcgcgaaagaagccggtaagatgcgagcggaaggcaaagattatatcgttaaagatggcgatataatgaacttcctgttcaacgtctaaataaaatttgttgtctcgtgaggttttgctgaatctcataagaggcaaagaaagtcataaaatccacgcagccgcgtggattttttatttcataatatctcaactcatactgacaggctcaattaacgcagagctaacagggtaagttcttttcttaattaccagtcgacattcactgtatggttataaaaaggatgctgatcctttagcggcgtctcataacttgggatcgcatcataatcatcttttccccgaacggaataccttcccgcttcgatatcaaaacgatgtttgagccatcccgcaacatgacttgcgaaagcctcttttcttcttaatggccaatcgacagaagccaaattaacatctaataagtaccgcccttctttattaaccttgatcattccagcctgcagtaacgcccgtaccacctgggattggttatcatgaatccagacccaggcatttccaaattccattgcataactatcatttaaaaaatctttttttgaatataattcacttacataatcattgatagagtcagcataattttttactttagatgcagataaatcaaaaaaagattcaaattcgaaagtattgtcattaatacaggacagtaacgcacccggttccgagagctgggtccatgattgtaaactctctacagctataatgaatttgaaagtatttcttccaatgacaccccggtcaattaaagttaaaatatcgtgagctacggtagggatatcttctgcaaacgggacgattatccccgcaccacttatttcgcttgatctaaaatcaaatcctggggtactttcaatgttttccggaataccatactctttaatatgattaaggaaattattaatatcgccacgatatggccatcgccattcacgttcatgtgtccagtcaatcttacctggaacataagtaacatatctatattgttcaatcaaaggaagagccgtttcatcaagaatacgttccccgtttctgccttgcgagcatcgagcattgttatgctgatccaacccatatatgactggccttgccccataattaaacatttgctctttaggtaaaacgattgcatataaaccgattttttcatttcgttctaatcggcgaacaccagtctctaaataagctgcaatcggcatatctgtaaagcataccaccggggagtcaccatatacggttcgttgcccatttcggtatgaccaggacgagaaaattttatgactgcgtaaagataatcgaagtaaatatttagcatcaatgaaacatgcgtggtgctgattattaaaaccacagtgctcaggcaaataaatatggctaccggtctctaaattaacgtcccgaaaaaaatgaatcaaataatcggataagtcaaatctgatgttatttttcatgggacgccctctttcaaacagtctcttttttgcattcctttaaaaccagcatcactattttatataaaaatcatcacgaagtatgcttcttttaacgatgacctcaaatcctccccccttttgcatcaacttacgcatccctgaaatggcgagaacaggctaaatctacccgaggtcactcgctaaaaacctcatcctggaacaagctcaaccgcccttccccgctacggccctttcgccgaaaaaccgataatgggtataaatataccgctataagctatacccacacacttcacattgtttcttatcgttaatccgatacgcttttttcacattatttctggcggtatacgccggtgcaaagtgaatcgggctcgtttccgcgctcgcgcgtaacacaatgatttaccttgctggcggaacgtcaacggacccgcaaaagcgccttatgcccctggcggagcgtggtgcaaaaaggagaaaaaatacgcgttatgaataacgaggagaccttttatcaagccatgcgtcgtaagggagtgacccgacgcagctttctcaaattctgtagccttgccgccacatcgctgggactgggcgccggaatgacgccaaagatcgcctgggcgctggagaataaaccgcgaattccggtggtctggattcatggactggaatgcacctgctgtaccgaatcctttatccgttcctcgcacccgctagccaaagatgtgatcctctcgctgatttcccttgattatgacgacaccctgatggccgccgccggcgcacaggccgaagaagtctttgacgatattaccactcgctacgccgggaaatacattctggcggtggaaggcaatccgccgttaggagagcaaggaatgttctgtatcagcggcggccgcccgtttattgaaaaactgaagaaagccgccgcgggcgccagcgctattatcgcctggggaaactgcgcctcctggggttgcgtccaggccgcccgccccaatccgacccaggcaacgcctatcgataaagtgatcaccgacaagccgatcgtgaaagtccctggatgtccgccaatcccggatgtcatgagcgccattatcacctatatggtgacgtttgatcgtctgccggaactcgatcgcatgggccgtccactgatgttctatggtcagcgtatccacgataaatgctaccgccgcgcccattttgacgccggtgaatttgtcgagagctgggatgatgacgccgcccgcaagggatactgcctgtacaagatgggctgtaaagggccaaccacctataacgcctgctcctccacacgctggaatgacggcgtctcctttcctatccagtccggtcacggatgtctgggatgctcagaaaatggtttctgggatcgcggctcgttttatagccgcgtggtggatattccccagatgggtacccattcaaccgccgatacggtggggctgaccgcgctgggcgtggtcgcggcgggcgttggcggtcacgctgtcgccagcgcgctcaaccaacgtaaacgccacaaacaacagttagcgcaagccgaacaacagccggacaatgaggataaacaggcatgagtaaccagtatcaaacccagggttataccgttaacgacgccggccgtcgtctgatcgtggacccgattacccgcatcgaagggcatatgcgctgcgaagtgaacattgatgagcaaaacgtcattaccaatgccgtttcctgcggcacaatgttccgcgggctggagatcattctgcaaggccgtgacccgcgtgacgcctgggcgtttgttgaacgtatttgtggtgtatgtaccggggtacatgctctggcatcggtgtacgctatcgaagatgcgattggtatccaggtgccggataacgccaatattatacgtaacatcatgctggctacgttgtggtgtcacgatcatctggtccatttttatcagttagccggtatggactggattgatgttctgaatgcgctgaaagccgatccgcgcgccacctcgcagttggcgcaaagcctttccgcctggccgatgtcatcgccgggctacttctttgacgtacaaaatcgattaaagaaatttgtcgatggcggtcagcttgggatattccgtaacggctattggggacatccacagtacaaattgtcgccagaggctaatctgatgggctttgcccactatcttgaagccctcgacttccagcgcgagatcgtcaaaatccataccatatttggcggtaagaacccccatcctaactggatcgttggcgggatgccgtgcgcgatcaatctcgatcaaagcggcgcggtcggggctatcaatatggagcgcctcaacctggtgcagtcgatcatcacccgcaccgccgactttattaacaacgtgatggttccggacgcgctggctatcggccagttcaataaagcatggagtcaaattggcaccggtctgtcggataaatgcgtgctgagctacggcgcatttccggacattgccaacgacttcagccagcaaagcctgttaatgccgggcggcgcggtgatcaatggcgattttaaaaatgttatgccggtagatttggccgatccgcagcagatacaggagtttgtggatcacgcctggtaccgctatccggacgatcggctgggccgtcatccttttgacggcattaccgatccctggtacaacccgggtgatgtcaaaggcagcgatacgcatatccagcagctcaacgagcaggaacgctactcctggattaaagcgccgcgctggcggggtcatgccatggaagtcggcccgcttgcccgaacgcttatcgcgtatcacaaaggggatgccgccaccatagagtcggtagatcgcatgatgtctgcccttaaactgccgctctccggtatccagtctacgcttggccgtattttatgccgcgcgcacgaagcgcaatgggccgtcggtaagctgcagtattttttcgacaggcttatgaccaacctgaaaaacggcgacctggccaccgccaataccgagaaatgggaaccggccagttggccgcagcactgccgcggcatcggttttaccgaagcgcctcgtggagcgttgggacactgggcgtcaatccgcgatcagaagattgaactctatcagtgcgtggtccccaccacctggaacgccagcccgcgcgatcctaaaaaacagatcggcgcctatgaagcggcattgatgggaacgcaaatggcgattcccgaccaaccgttagaaatcctgaggacgctgcacagcttcgacccctgcctcgcctgttcaacccacgtgctcggcgacgacggcagcgaactgattgccgtccaggtacgctaagcgttaaggaaaagaacgatgactggaaagctatctccacgcgtcggggaggcgcgtgatactgccgtcagccactatgtgtttgaagcgccggtacgcctgtggcactggctaacggtggcctgcatgttggtactgatggtaacaggctacttcattggccggcccttgccgtcggtgagtggcgaggcgacctatctgttttacatgggctatatccggctgatccactttgccgccgcgatgatctttaccgtgttactgctggggcgaatttattgggcctgtgtcggcaaccgctattcacgagagctgtttattgtcccggtctggcgtcgtagttggtggcaaggcgctttcaccgtggtccgctggtatctgtttctggagaaaaaaccggggagcgacatcggacataaccctgtcgcgcaggccgcgatgttcggctatttcctgttgtcggtatttatgatcctcaccggtttcgctctgtttggcgagcatagccagtacgccatctttgcgccgttccgctatgtggttgaatttttctactggaccggcggcaactccatcgatattcacagttggcaccgactgggcatgtggctgatcgccgccttcatcgtcgggcacgtttacctcgctatccgggaagacattatgtccgacgatacggtgatctccaccatgatcaatggctatcgcagccataaattccccaaaccgcacgacaaggagccctcatgaatgcgcaacgcgtagtggtgatggggttaggaaacctgctgtgggccgatgaaggattcggtatccgggtcgcggagcgtttgtatgcccgatatcactggcctgaagaggtagaaattgtggacggcggtacgcaagggctaaacctgttaggttatgttgagcaagccagccatctcctgctccttgacgcgatcgattacggcctggcgccgggcagcctgcgaacctatgccggcgagaaaatccccgcgtatctcagcgccaaaaaaatgagcctgcatcaaaacagtttttccgaagttctggcgctggccgacatccgcgggcatctgccctgtcacattgcgctggtcggcctgcaaccggcgctactggacgactacggcggtagcctgagcgaaatagctcgcagccagctaccggcggcagaacaggccgccctggcgcaactggccgcctgggggatcgtgccgcaggcaaatgaggtcgcacgctgcctgaactataaatgcctgtcgatggaaaattatgagggagtgcgcatacgtcagtatcagacacgtctggagggcaaaagaagtggcgaatgacaccccgttctctgcgctatggcaacgcctgttaacccgtggatggcaaccggtagaggcttctacggtagacgactggatcaaacgggttggagatggcgtcatcctgttaagtagcgatccgcggcgtacgccggaagtcagcgataacccggtgatgattgccgaactcctgcgtgagttcccgcagtttgactggcaggtggcggtggccgaccttgaacaaagcgaagctatcggcgatcgctttaatgtacgtcggtttccggcgacgttggtttttacagacggcaagctacgcggcgcgctcagcggcattcatccctgggctgaactgctcacgctgatgcgttcgatagttgacactcccgcagcgcaggagacagtacaatgagcaacgccttttttcatctgctggggccaggtacgcagcctgatgacgccagtttctcgatgaatcccttaccgctcacctgtcaggtcaatggcgacccaagtatggcggcgctggagcgctgcgctcacagcccggcggtgatggcattgttgaccgatctgcgaggtcagcttgcccggcgcatcccggaagtcggcgacgtgctgggatgggagttatctcccctgaatgccgatgatctctcattcctcaatacgctattgggcgaaggcgaagtctcggtacgcattcagcatccggacgggagtgaaagcgagatccaggagaccatcttctgcggcctgtggcgggtacgccatctgcataaccgacgtctgctgacggatcgtctggaagcgggtagcgcgcccctgacattatggcaagcggcgactgccgatacgctgcctgacgactctctgctgcctccgcctgtcgctggcctgatgaatggactgccgctggcccatgaattattggcgcacgtacgcgatccggcgttgcaaccacacagcatcaatttgacccaactgccgctcagcgaggccgatcgtctttttctggcgcgtttatgcggacacgggaacatccagattcgcatctccgggtatggcgaaagccaaatcaacgccacagcattgcgccatctctggcatgtgcgctgtctggacgcccttaaagggccgttgctcgatagctatgagatttgtcctttgccggagctggtactggcggccccggaagatctggccgattcgcgccagcgcctggatgaagtctgccgatggctggagacgcgctagcgctctcaacaggaacgtcaccggagtccggtactgattagctttttactctctttctgcctacaggagttagcatgtgggatgtcattgacttatcgcgctggcagtttgcgctgaccgcgctgtatcactttttatttgttcctcttacgcttgggctgatttttttgctggccgtcatggagacgatctatgtggtgacggggaaaaccgtctaccgcgatatgacgcgtttctggggcaagctcttcgggatcaattttgctctcggtgtggctaccggcctgaccatggagtttcagttcgggactaactggtcgctctattccaactatgtgggcgatatcttcggcgcgccgctggcgatggaagcgttactggccttttttctcgaatccacttttgtcggtctgttctttttcggctggcagcggctgaataaataccaacacctgctggtcacctggctggtggccttcggctccaatatttcagcattatggattctgaatgccaatggctggatgcagtatcctaccggcgctcatttcaacatcgatacgttacggatggaaatgagcagcttcagcgatctggtctttaacccggtgagccaggtgaaattcgtccataccgtcatgtccggttatgtcaccggcgccatgtttattatgtccatcagcgcctggtatctgctacgtggccgcgagcgtgaggtggccttgcgctcgtttgctatcggctcagtattcggcaccctggccattctgggaaccctgcaactgggggacagttcggcctacgaagtcgcccaaattcagccggtgaaactggcggcgatggaaggcgaatggcaaaccgaacccgcgcccgcgccgtttcatctgattgcctggccgcagcaggaacaggagcgtaatgcatttgccgtgaagatccctgctctgctgggtattctggccacccattcgctggatacaccggttccggggttaaaaaacctgatggacgacgctctgccgcgcctgaagcgtggccgggaggcctggttactcatgaaggagatagcgcaaggcaatcgctcgccgcaggtactgaatgcgtttcaggccgttgagggcgatctggggtacggcattctgctggcgaaatatgccccggatatgaaccatgtgacgccggagcagtatcgtgcggcccagcgtggcgctattcctcaggtggcgccggtgttctggagtttccgtattatggtcggctgcggttcgctgctgttagtggtgatgttgattgcgttgatacagacgctgcgaatgcgtatcgaccagcatcgctgggtattgcgtatgacgctgtggagcctgccgttaccgtggattgccattgaagccggttggtttatgacggagtttggccgtcagccctgggcgattcaggacattctgccgacctggtacgctcactccgcgctgacgccgggccagctggccttctcaatgggacttatcctcggactttacaccctgtttttaatcgcggaagtctatctgatgcagaagtacgcgcgtcttgggccgagcgccatgcaacatcaacaacaagcgcaacaacagggataaaggagacaatcatgttggattatgaaacgttgcggttcatttggtggctgctgatcggcgtcatcctggtggcatttatggtaactgacgggtttgatatgggtgtcggttgcctgctcccgctgatagcgcgcaacgatgacgaacgccgggtattgatcaatagcgtgggcgcccactgggaaggaaaccaggtatggttgattctcgcgggcggggcattattcgccgcctggccacgggtctatgccgccgcgttttccggtttttatgtggcgatgatcctggtgctgtgtgccctcttctttcgcccgctggcctttgattatcggggaaaaatcgccaatgcccgctggcgcgcgctgtgggataccggtctggttatcggcagcctggttcccccagtcgtattcggcatcgcgttcggcaacctgtttttaggcgtgccgtttgccttcacgccgcagcttcatgttgactattttggcaccttctggcagttactctcgccctttgccctactgtgtggattattgagtctgtcgttggtgattatgcaaggaggcgtctggttacagttgaaaacggagggcgttattcgtcaacgggctctgtcggccacccgctacagcgcgctgctgatcgtgatctgcttcctgctggccggttactggctgtgggccggcgttgatggctttgtcttgctcacgcaggatgccaacggcccttccaatccgctcttaaaaggcgtggcgatactccctggcgcatggatgaaccactttatacgctcgccgctactgctcatcatcccgttgctcggtatgatcctgccgattctggctttctatgcctgccttcgcggtcagactattcgtggatttctgttcgcttccctgacccaggcctgcgtcatctttaccgccggcataacgctatttccttttgtgatgccgtcgagtgttagtcctctctccagcctgacggtgtgggacagcacctccagccagatgacgctcgaaatcatgctggtgattgtgctgatttttctgccgatcgtactgctctatacgctatggagctattacaaaatgttggggcgtatcaacctggggaccctccgccgcaacgatcatgaactttattagggagcgggagcgatgtggtatttactgtggtttgtcggcattctgctgatgtgctcactgtcgacactggcgctggtatggcttgagtcgcgtcaacaataaagaggtaaaccggggtcagcgccgtctgactccggttatttttatctttttacgcgcctggtgaagacgtttccccgccgacaggacgacataacattgatacatgtcgttatcataacgtttacttttagaggtgcgtcataattatgacaaatagccaccttgcacatatttcgcatatttaagcaattaattgcataattagcaatatatcacctcttatagcggatagttaaccacttcccatccaaaatcataacgaaaatccaactgcctgccatttttgatctgagttaattgtttaaaaaagtgttaaatttatcgctacatggtgtgatctactatgtaccacggtcaattaaagaacatattacttttatcactaaggtttatcatggataagttatcttacgcttcagatagcagcacatctgcctggaatacctacctgcaacaaatcgagcgtgtggccccttatctgggcgagttatccccctgggtggatactctgcgccacccaaaacgcgctctgatcgtcgatattccggtacaaatggatgatggcactattcgtcatttcgaaggatatcgcgtgcagcacaacctctcccgaggtccgggtaaaggcggtgttcgctaccatcctgacgttgatctcaatgaagtgatggccctgtcagcatggatgaccatcaaatgtgccgcgctgaacctgccatacggcggcgctaaaggcggtatccgcgtcgatccgttctcgctgtcggaaggtgaactggagcgtttgacccgccgctataccagcgagatcggcattatcatcgggccgcagaaagatattcctgcgccggatgtcggcaccaacggtaaagtgatggcctggatgatggatacgtattccatgaatcatggcacgacggtcactggcgtcgtcaccggtaagcctatccatcttggcggttcgctgggccgtgaaaaagcgacggggcgcggcgttttcgtcagcgggctggaagccgcacgtcgggcgaatattgctgttgaaggcgctcgcgttgcggttcagggttttggtaacgtcggcagcgaagccgcgcgtctgtttgcaggcgctggcgcccgtgtcgtggcgattcaggatcataccgcgaccctgtttaacgccaccggtattgacatgaaggcgctcacggcatggcagacagaacacaaacagatagccggtttcccgggcgcggaaactatcgccagcgatgcgttctggcgtctggagatggatattctgatcccggcggcgcttgaaggtcagataactcgtcagcgcgcggaagccctgacgtgtaagctggtgctggaaggggctaacggcccaacctatccggatgctgatgatgttctggccagccgtggtatccttgtggtgcctgacgtggtctgtaacgcaggcggcgtaaccgtcagctacttcgaatgggtacaagatatggccagcttcttctggagcgaagaagagatcaatgcgcgcatggacaaaatcatgaccgacgcgattgtccatgtctgggagaaagcggctgagaaatcctgctctctgcgcaccgcagcctatattgtcgcctgtgagcgcattctgctggcccgtaaagatcgcggtatctatccaggttaaggcgacaaatcattgcgctaaaatccacgtcccggcgtggattttttgtctgtataccccgttttccacgcgcgcgccgataaattctgtctcaataaaatgtctgtttgttcgcaaaatagcggttcaatcacgcgtatctggtcatcgtagactaaggttttgtcatggtaaatgccgttggctttggctcaccgctaaggagataacttgatgatacccccagagattcgccgttctgttctactgcagaaagccataaaactggcgctggcagggacgctgctgacgtttgcatcgttttcggcgactgccgcagacccgtcttccgacactgaaactccgcagccgccggatattttgcttggcccgctctttaatgatgtccagaatgcaaaactcttccccgatcagaaaacctttgctgacgccatacctaatagcgatccgctcatgattcttgcggattatcgtatgcagcggaaccagtccggcttcgatttacgtcattttgttgatgttaacttcaccctgccgaaagcgggtgaaaaatatgtcccgcctgccgggcagtcattgcgtgaacatattgatggcctgtggccggtgctgacacgttcaactaaaaacgtcgaaaagtgggactcgctcttgccgttgcctgaatcctatgtcgtgccgggtggtcgattcagagagatttactactgggacagctactttacgatgctggggctggcggaaagcgggcactgggataaggtggcggatatggtggcgaactttggttacgaaattgacgcctgggggcatattcctaacggcaaccgtacctactacctgagtcgttcgcagccgcctttctttgcgtttatggttgagttactggcgcaacatgaaggtgacgatgcgctgaaagaatacctgccgcaactgcaaaaagagtacgcctactggatggagggcgttgagacattgcagccagggcaacaaaaccaacgcgtcgtcaaactggaagacggcagcgttctcaaccgctactgggacgatcgggatacgccccgccctgaatcctgggttgaagatatcgctaccgccaaaagcaaccccaaccgcccggcaacggagatctatcgagacctccgttctgctgccgcctccggctgggatttcagctcccgctggatggataatccgcagcagctcagtaccattcgtaccaccactattgcccctgtcgatcttaacgctctgctgtatcaactggagaaaaccctcgcccgcgccagcgctgcggcgggcgatcgggccaaagcctcgcactatgacgcgctggccaacgcgcggcaaaaagccattgaaatgcatctgtggaataacaaagagggttggtatgccgactacgatctgaagaacaataaaatccgtgaccaactcaccgctgccgcgctgttcccgctctatgtaaacgccgccgcgaaagatcgcgccgcgaaagtggcggcggcggcccaggcgcatctgctacagcctggcgggctggctaccacctcggttaaaagcggacagcaatgggatgcgccaaacggctgggcgccgttacaatgggtcgctgccgaaggattgcaaaattatgggcaggatgacgtggcaatggaagtcacctggcgctttttaaccaatgtgcagcacacctacgatcgcgagaaaaaactggtcgaaaaatatgatgtcagcagcaccggaaccggcggtggcggcggcgaatatccacttcaggacggctttggctggaccaacggcgtgacgctgaaaatgctcgatctgatttgtccgcaggaaaaaccgtgcgatagcgtaccgtctactcgtccggcatcgttaagcgcaacgccgacaaaaacgccgtctgcagcgacgcagtaacgcgtgtttatagtaggttgacccggtgctgaccgggtcaacgcttacacgttctgcagcggttagccgcgtcgcagaaggcggaaaatcaccagcaccacgatcgcgcccaccacggcgaccaggaaactgtgcagattaaagccgctgatactgccgccaataccaaacatcgtcgccagccatccgccaacgaccgccccgacgataccgagaatacaggtcaggataaatcccccgccatcgcgccccggcataagcaatttggcgataacgccggcaatcaaaccaaaaacaatccaggcgataattcccatttgcgaaccctctttccagtaaaaacgttttaagtataggcaaagtcgagcgtcgcatttctgaacactgatttatctcgcggacataaaaatttatttatcgctattaagttctttctaccgatgccgataacccaacgatagtctgcgtatcaggggttatttcgtgtgagtggttacaatgagcagttcctgaaaaaaaatccattagcgatattaggcgtgctacgggatttaaataaaaatcaggttccactgcgtatttcatgggcgcatggtcaattcatcagtaaaattttggcggtagacccggaaaaactcatcgtggattacggcagccaggaatacgaaaatagcgccgtattacgtgccgggcaggtagccattatcgcagaaacgcagggcgcaaaagtcgagttcacgttgccgcaactcgttacaggcgaatatcagcggctgccggcctttatcacgcccctgccgtcgtcactgtggtttgtccagcgccgggagtattttcgcattggcgcgccgctgtatccgccttattacggcgtcaccacgctaccggacacccgtacgttacgttttcgcctgtttgatctttccctgggcggcatgggcgcgctactggaatccgccatccccgacggactaatcgaaggcgcacgcttttcgcaggttgaactgaacatggggcaatgggggatttttcacgttgacgcccagcttatctccatcagcgagcgtaaggtgattgatgggaaaaatgaaacgatcaccactccccgcctgagctttcgtttccttaacgttagcccggcggtggagcgggagttgcagcggattattttttcgcttgagcgcgaggcccgagaaagagcgaataaagtgcgagaataatcttcacgctaaactacatggcgtccagcgcctgctgaagcttccagatatagcgcggcgcctgcggcgcgggatgattatcaacaacatgttcaaaaaactcgtccgcatccagatcgttaattttttctatcgccttcttcctgtcggatgaaaaagtacgcaataacgcgcctgcgccgttagcataagagacgaccagcgcatattgcatcacctgcggatctttgatgccggccagcggcccattttccagaatgctcagatacgccgcgcccattgagatgttacgctcagggtttttcagctcgctggtggtcggttcgccacgccagcccatacgacggtaaacgtcgcgcccggaggtcgacgcctttaactgcatcaggccaatcgcattagatttactgaccgcgttagggttgccgccggattcaatggcgataatcgcggtgattaaatgcggatcaaccccccatgccgccccggctttttcactgatgggcatccactgcatcgcacgctttacaggcacttcggcattccacggcggattcctgtaatcctgttttgagctacagccagccagtattactaccaaaaaagcaaaccatcttaatttcacgtcatctatccttatagccgtaacttatctgccgaagaggtcataccgccccggccaggcacttaggttgcctccctggtgcgcatccagaaacgtcgcacaacgagggacatcgcctaatatatgcggcatgatatacatttgcattctattgtcagcaaggaattaccatgtctctgtttcatttaatcgccccgtcgggctactgtattaaccaacaggccgcgttacgcggcgttcagcgcctgactgacgcgggtcatcaggtggagaatgacgaggtgattcgtcgccgctttcagcgttttgccggtacggacgcggaacggctggccgatgttaattcgctggcctcgctaacgtcgccggatacaatcgtcatgccggttcgcggcggctatggcgccagccgcttgttggatcgtatcgactggcaggcgctcgcctcccggcaacagcgcgatcccttactgatttgcggtcatagcgattttacggcgattcaggctggactcctggcgcaggccaatgtcatcacctttagcggtcctatgctggcggcaaattttggcgccgaaacgctgaatacgttcaccgagcaacatttctggctggcgctacgcaaggcgcaatttaccgtagagtggcaaggcgacggccctcagtgcgacgcacagggcaccttatggggcggaaatctggcgatgttgatttcccttatcggtacgccctggatgccgactatcgataaaggaattttagtgctggaagatgtcaatgagcatcctttccgggtggagcgtatgcttttgcaactggagtacgccggaattttaaaccgccagagcgccatcgttctcggcagctttagcggcgcggcgcccaacgagtatgacgccggttattctctggagagcgtctacgcgtttttacgttcccgtctgtccgttccgctgattaccggtctcgacttcgggcatgaacaacgtacggtaacgctccctatcggggcaaacgcgatgcttaaaaatacgcgccaggggactcaactcactttatctggccatcctacgctgcaattgtaaaaaaagtccccgacaggctaagtaaaacgctgccctggccgttattatgttaatgttaaataatacaaagtcgtgtgagtcaggagatataaaacgttggatgctgcaacaattattagtctatttattttaggttccatccttgtaaccagcagtatcctgttaagttcattctcatcgcgactgggtatcccgattctggtcattttcctcgccatcgggatgttagcgggtgtggatggcattggcggtattcctttcgataattatcctttcgcttatatggtcagtaacctggcgctggcgattattttactcgatggcggaatgcgcacccaggccagctctttccgggtagcgctgggccccgcgctgtcgctggcgacgctcggcgtactgatcacgtcggggttaacaggtatgatggccgcctggctgtttcatctggatcttatcgaaggtctgcttatcggcgcgatagtcggttccactgacgccgcagcggtcttttctctgcttggcggcaaagggctaaacgaacgtgtaggctccacgctggagatcgaatcgggaagtaacgacccgatggccgtttttctgaccattacattaattgagatgatccagaagcatgaaaccggcctggactggatgtttgccgtccatattatccaacagttcggtctcggtattgtttttggcctgggcggcggttacctgctacagcagatgatcaaccgtatttctctgcccagcggcctgtatccgatgctggcgctcagcggcggtattctgatttttgctttgacgaccgcgcttgaaggcagcggcattctcgcggtctatctgtgcggattcctgttaggaaaccgcccgattcgcaaccgttacggcatcctgcaaaactttgacggactagcctggctggcgcagatcgcgatgttcctggttctggggctgctggtgacgccttccgatctgtggccgattgccgtccctgcgcttattctctccatctggatgattttcttcgcccgcccactgtcggtgtttaccggcctgctgccatttcgcggcttcaatcttcgggagcgcattttcatcagttgggtcggactgcgcggtgcggtgccgattattctcgccgttttcccgatgatggccgggcttgaaaacgctcgcctgttctttaatgtcgctttctttgtggtactggtgtcgctgctcctgcagggaacatcgctgtcatgggcggcgaagagagccaaagtggtcgtgcctccggttggctggccagtatcgcgcgtggggcttgacatccatcctgataatccgtgggagcaattcatttatcagttgagcgccgacaaatggtgcgtcggcgcggcgttgcgcgacctgcatatgccgaacgaaacccgcattgccgcgctatttcgcaataatgaactgtttcaccccacgggtagcactcgcctgcaggaaggcgacgtactctgcgtgattggccgggagcgcgatctgccagcgctgggcaaattgtttagccagtcgccgccggtttcgttagatcagcgtttctttggcgattttatcctcgaagcgaatgcgaaattcgccgacgtggcgcttatctacggtctggaagaaggaacggaataccgggataaacaacaaactctgggtgaaatcatacagcagctgctgggcgctgcgccggtcgtcggcgatcaggtggagtttggcggcatgatttggacggtagctgaaaaagaagataacgtggtacgcaagattggggtacgcgtcgccgaagacgaagcagaataaggtcgcctggcaacgtcgacccgcccccaagtggaccggtcgacgccttagcctgaattaggttacgttgtcacaaacggcacacgcggcgctacggcgcacagtagctcatagcccagcgtgcctgccgcagaagcgacatcatcgaccttaatttctttgccccataattcaaccggcgtgccgattcccgcctgcggacacggcgtcaaatccaccgccagcatatccattgaaacggtgcctactgttctggtacggataccgtccaccagcacaggcgtcccggtcggcgcatggcgtggatagccatcggcataacccgccgcgacgatgccaatgcgttgttcctgagtcacagaataccctccgccatagcctaccctttcacccgcgctcagcgtctgcacgccaataatttcgctactcagcgtcatcacaggttttagtccggtatcggcaatatcccgccactgtcctgacggcgacgcgccgtacaaaataatgcccggcctgacccagtcataatgcgcctggggatgccacagcgtcgctgccgaatttgataacgagtatgcacactgaagaccttccgtcgccagcgcaatacgcctcatcgcctccccgataccttccggatgatcggcctgagcaaaatgtgacatcagggtcatttcaccgacattgcgcattgcccgcaattgctgccagacggtctgcgcccgctcaggctgaaaaccgagtcggttcatgccgctgttgactttgacatagatatccagcggcgcgttaagccgcgcattttgcagcgctttcaactgccagttactgtggatgcaggtggtcagccgataagtgtcatacgcctccaggtcttgcgcatggaaaaacccctccagcatcaatatcggccctttccacccgcgctcacgcagggtaatcgcctcttcaaggttgagcatagcgaaaccatctgtggcgcccagcgcgctccagacgcgttcaataccgtggccgtaggcgttggctttcactaccgaccagacgcgcgcctctggggccgcccggcgcacaatagccaaattttgtttcattacctgtaaatcaaggctggcctgtatagggcgggtcatttcacttcctttatcagttatgcgcgctatgcaaacgttgcgggggggtgggcgtaaaatcggaacggtatcgcgccacgctcagatcgtcgtagggtatcgctggcgtgcgacccgacaagatatcgcttaacaactggcctgaaccgcaggccatcgtccagcctaaggtgccgtgtccagtattaagccacagatttttataacgggtgcgtcctactaccggcgtgccgtccggcgtcatggggcgcaggccggtccagaatgtggcctgctcaatatgaccgccgcgcggaaagagatcgcgcacaaccatctccagcgtctcgcggcgcggttgcagtaagtcggtattaaagcccacgatttccgccattccccccacgcgaatacgcttatcaaaacgcgtaatagcgattttgtaggtttcatcaagaatcgtcgatactggcgcgccgtctggctcgacgattgggatggttaatgaatagcctttcagcggatacaccgggatatcaacaatgcctttaagcatcgccgtcgaatacgatccaaacgccataacatacgcatctgctttaatgatctcatcggcgcatttcacgccgtaaatctgatcattttcgtacagtaatttttccacgggagtattaaagcgaaaggttacgcccgcctgctccgccatgcgcgccagacgctgggtaaagagctgacagtccccggtttcatcattcggtaagcgcagtccgccggttaatttatgcgcaacctcagccagagcgggttcaacttccgccagtcggctggattccaggagctgatacggcaccccggcatcttccagcacggcgatatcacgggtggcgttctcatactgttgcgcggtgcggaagagttgtagcgttcccccctggcggccttcatattcgataccggtcgcggcgcgtagcgttttcagacagtcgcgactatattccgccaggcgcaccatgcggcctttattttccatataatgccgggtatcgcagttacgcagcatttgccacatccacttcagttgaaatggagtgccatccagacgcaccgccagcggcgcatggcgctggaacatccattttatcgccttcagcggtacgccaggggccgcccagggcgccgcatatcccggtgaaatttgtccggcattcgccgcgctggtttcttgcgccgggccggattcgcgatcgatgacggtgacatcatgccccgcctgactcaagtaccaggcgctggtcacgccaactacgccactccccaggatgacaactcgcatagccactccgttaatagtaaaagaacaatcttctgattacatcttgataacccagatgaaaatattattcaacatatgacttttttatggtgacgtgcttcacatataccctaaagacaagcgatcccactggtttgggatctcctgctacgcggcatggctatacagcataaaatgatgccaatacccgattttttgccgttcaatgtggaggaaaccgcaaagaaaagttttcacgatcaagtcgttttttaacatggtgttctatgcttgaaaggaggcgctccatacagagagcgtcgccaacaatgagggtgcgcgaatggcaatgattgattccatgaacaaggacaccacacgtttgagcgatggacccgactggacatttgagctgctggatgtctatctggcagagatagaccgcgtggcgaagctctaccaactggatacttacccgcaccaaattgaagtcatcacttccgaacagatgatggacgcctactccagcgtcgggatgccgatcaactatccgcactggtcgtttggcaaaaagttcattgagacggaacgtctgtataagcatggtcaacaaggactggcttatgaaattgtgatcaactctaatccctgcattgcctacctgatggaagagaacaccatcaccatgcaagcgctggtcatggcgcacgcctgttacggccacaactccttttttaaaaataattatctcttccggagctggacggatgccagctctatcgtcgattacctgattttcgcccgaaattacattacccgctgtgaagaacgctacggagtggatgaagtagaaaaactgctcgactcctgccacgcgctgatgaattacggcgtcgatcgctataagcgcccgcagaaaatctcgttgcaggaagagaaagcgcgacaaaaaagccgggaagagtatctacaaagccaggtgaatatgctgtggcgcacgctgccaaaacgcgaagaagaaaaaacggtcgccgaagcacgccgctttcccgctgaaccgcaggaaaacctgctctattttatggagaaaaacgccccgttgctcgagccgtggcagcgcgaaattctgcgcatcgtgcgtaaagtcagccagtatttttatccgcagaaacagacgcaggtcatgaacgagggctgggcgaccttctggcactacaccatcctgaaccatctgtatgatgaaggcaaagtgacggaacgctttatgctggagtttttacacagccataccaatgtcgtatttcagccgccctataatagcccctggtatagcggaattaacccctatgcgctcggctttgccatgttccaggatatcaaacgtatttgtcagtcccccacggatgaagataaatactggtttccggatattgccggttccgactggctggaaacgctgcacttcgccatgcgcgattttaaagatgaaagctttatcagccagttcctgtcgccaaaagtgatgcgtgatttccgtttcttcacggtacttgatgatgacaggcataattatctggagatctccgccattcataacgaagaaggttatcgggagattcgatcaaaactgtcgtcacagtataacctgagcaatctggagccgaatattcaggtctggaatgtggatttacgcggcgacagatcgctgacgttgcgttatatcccgcataaccgcgcaccgctggataaaggccgcaaagaggtgctgaaacatgtgcatcggttatggggctttgatgtgatgctggagcaacaaaatgaggatggcagcgtagaactgctggagcgttgtccgccgcgcatgaacatgctgtaatcgagatgctgcccggtagtgtttgcgcttaccgggcatcgcgggattatcgtccctgaatcgctaaatcgccgggcagatttttctgcatccgatgccaaatctcgccgctgtcatgcccgtaacgtcgcaccgtttcatacacctggtcgtgcgcgccctgctcgcataacgacgataatttatgatagaaacccagtgccagactgcgcgcttccggattggcgaaatagtggcgaccaatgcgggtgtataaccctttcatgccgttcaggatcaagccgtaaataggattgccggaggcgaatgccagaccacgaaagatgttatagtccagatcggcgaatgcatcggcatggtcggccacttcgtgggcagtggccagtacttcctgcgccttatccgggtgttgacgcaacgcggtacgaataaagatagtagaaatattggtacgcaccgacaacaaattgtcgatcagttgcggaacgctttcatgatcaaggcgggccagcgtttcaaggatattcagccctgacgtttcccaaaaattattaacctttgtcggtttgccatgctgaatggtcagccagccatctcgcgccagccgctgtaacacctcgcgtaatgtcgtgcgcgtcacgccgatcagttcggagagttctcgttctgccggtaagatcgtgccaggaggaaagcggttattccagatactttcaataatatactcttccgcgaaacccgccgggctctgcgccttaatgaccatagtgagatttccattacacagcaaaacatagttgcactcatcataccagacgggcgtaacacctgatagcggacgcaatgaagaaaaaggggatcaaggcaccatttctgatatcgcctgccaatatcgttaaggacttgcttgcattcgtcgcgctcgctactctctgtgtttaaacataaaaacgctatttcatttttctaggtaaggaaaaatttcatggagatctcatggggtcgcgccatgtggcgcaactttttaggccagtcgcccgactggtacaaactggcactacttgtctttttaattgttaacccattcattttcttagctaatccctttattgccggttggctgctggtggcagagtttatcttcactctggcgatggcgttaaagtgttaccccctgctgcccggcgggttactggccattgaagccgttatcatcggtatgaccagcgccgcccatgtacgtgaagaggttgccgccaacctggaagtcttgctgctgctgatgtttatggtggcaggcatctactttatgaagcagttattgctgtttatttttacccgtctgttactcagtatccgctcgaagatggttctgtcgctggccttttgcgtcgccgccgcattcttgtcggctttccttgacgcgcttaccgtcgttgcggtggtgatcagcgtcgccgtcggtttttacgggatttaccatcgtgtggcctcatcgcgcggcgaagagaacgatatgctggacgacagccatatcgatccgcattacaaaacggtgctggagcaattccgcggattcttgcgtagcctgatgatgcatgcaggcgtggggacggcgctgggcggcgtcatgaccatggtcggggagccgcaaaacctgatcatcgctaaagcggctggctggcatttcggcgacttctttttgcggatgtcgcctgtcaccgtcccggtactggtatgtggactgttaacctgtatgctggtcgagaaaatgcgctggtttggctatggcgaaacgttgcccgaaaaagtccgcgacgttttacagcaattcgacgatcaaagccgtaagaagcgcacccgccaggataaaattaaactcatagtccaggcgattattggcgtctggctggttaccgccctcgccctccatctcgcggaggtgggactgattggtctgtcggtcattattctggccaccgcgttaacgggtgtaaccgatgaacacgccatcggcaaagcgtttaccgagtcgctgccgtttactgcgctgttaaccgttttcttctccattgtggcggttattatcgatcaacatcttttcgcgccgattattcagttcgtcttgcaagcctctgaacacgcgcagctaacgctgttctatctctttaacggcctgttgtcttccatctcagataacgtctttgtcggcaccatttatatcaacgaagcgaaggcggcaatggaaaacggcgctatcagcttaaaacagtttgagcttttagccgtggccatcaataccggtactaacctgccatcggtagcgacgccaaatggtcaggcggcattcttattcctgctgacctccgcgctggcgccgttaatccgtctctcctatggccgtatggtctggatggcgttaccgtacactatcgtactgaccctgatagggctactgtgcgtcgaattcactcttgcgccggccaccgaatggatgactcaggcaggatggttagcaacgctttcgtaacgtttggccgggcaatacaccgcccggctccgatttttgcctgataattatccaattacacattatttcatttcccgctagtggcgcacgaattgaattggtttacactgcggtctctacgcatgttgcagggaaattattatgttgcgatttttaaaccagtgctcacggggtcggggcgcatggttactgatggcgtttaccgccctggcgctggaaatggtggcgctgtggttccagcacgtcatgttacttaaaccttgcgtgctatgtatttatgaacgttgcgccctgtttggcgtgatgggcgcgggtctggtcggcgcaatagcgccgaaaacgccgctgcgatacgtggcaatggttatctggatttacagcgcctggcggggtctacaactggcgtatgaacatacgatgattcagttgcatccctcgccgttcatgacctgtgactttatggcgcgctttccagactggttgccgttgggtaaatggctgccacaggtgtttgtggcatccggtgattgcgccgaacgccagtggtcgtttttaacgctggagatgccgcaatggctgttggggatctttgccgcttaccttgtggtggcgatagccgtcgtcatagcccaggcatttaagcctaaaaaacgcgacctgttcggtcgttgatacacacgctccttcgggagcgttttttttgcccgaagcgttgtttgccagtgattaaaaggtgtatattaaatacatcttttaatcaccacatcagggagatgtcttatgtcccacttacgcatcccggcaaactggaaagttaaacgctctaccccctttttcaccaaagagaatgttccggcggcactgctctctcatcacaacacagcggcaggcgttttcggacaactctgcgtgatggaaggcaccgtgacctactatggctttgcgaatgaaaccgcgacagaacccgaagtgaaagtggtgattaatgccgggcaattcgccaccagtccgccgcaatactggcatcgggtagagctgagcgatgatgcgcggttcaacattcatttttgggtagaggaagaccatcagggcgaggaaatgtatcaacagaaaaaagcctgacatcggtaaaccagtcaccactgggcggcgtcccgcccagtagccaggtgattaatggcgctaattaaacgctagagtagtttaattttaacgtggtatccctcaagccctttcatcgtttctcgcggcgcgaactctatttcggaaacctcttgcccggttttcttccgtagttcggcaacctttttgctaatgagtgccgcgatttcctcttctgctttatgtgtcaactcttcgctgttcattgatttcctcctttgaactcgcaaacggctaagcgcaataagacagtgtcgtcatggacgcgctactattttaacgtacaaaaaattataggctatctttctgaggattatcaggatgtttcgctttagaagatgtaaaaaaccgcctggcacagacggtgcatcaggcggttggttaatagcacaagacgctatctacgaggatcttcaacctcattctgggtatccgggtcgagaggatcgtctccctctggtgtatccggaatattttcaccaggaagcggctcatcctctggtaatggatcgactaaatcaggacgttcagacataaagcctccaacgaaccatagttattaaagataccctacagcactacttttggtttttctttggattttttccttcgtcttcgggtgtcttatcaggcttcctgggctgatcctttgaaacgcgcaacggttggttattcatggggtaactcctcaggataggcagcgatatactgctttgaaagtatagagtcgccgccatacgtgcgcgagcgcagcgacaaggcgcgtcagggaagaagagaaggcagtgataacgccaggtgacggaatttgcacgcaattcctggcttcaggggccgcccagcgtaaattaaagaattgtaaacaatcagccgttttgccgaagacttattctgcccacgacggtttatttaaaatatgatcctgccagtcccgtacttcagattctttaaccgcgatatgacggacagaaattcgctcgccatgcatagcagctttcgatccagtcagcagcggatgccacgtcggcaagggcttaccttccgccaacaaacggtaggcgcaggtcatcggcaaccattcaaagtctggcaagttttcgcgagtgagtttgatacagtcgggttcaaattcaaaacggcgctcataatgacggcactggcacgttttgatatttaattgcctgcacgccacgttggtgaagtagatttcatctgtatcttcatccatcagcttatgcaggcagcattgaccgcagccatcgcacagcgactcccactcggcatcggtcatttcatccagggttttacgttgccagaaaggtgtatcgctcattaaagtatccgccattgcactaaagctgcaccttataaccagtctggcctgcagatgcaagttttaccgccgctgaaggcggcaagcagattttacagaacgcgggtagacaacgtttcgccattaaaacgaatgtccagctcatcgccgcttaataatggccccacgcctgccggcgtgccggttagcaccacgtccccggctttgagcgtaaaatagcggctcatataggcgataaggggcacaataggatgaatcatatccgcggtcgacccttgctggcgaacctcgccattaacgttaagtccgataaccgtattttgcggatcgccgcagaaggccgcgacagggatgaagcctgaaatcggacatgcgttatcaaaacctttggctttttcccagggctgtccggcctttttcattttcccttgaatatcgcgcagggttaaatcaagcgccacgccataaccggctatcgctttacgtacatgatcttcggtcgcctggcggagcgttgcgccaatcagcacagcaagctcaacttcatgatgaacagcccccatatccgccggaatcgccagcggctggcgaatatcacacaatgcggtttccggcttgataaaaagcacgggttcttccggcgtcgcgctgcccatctccttgatgtgatttgcgtaattactgcccacgcagaccactttacttaccgggtaatcaagcaaggcgccttgccagttacgatgttgatacatattttcccctaagatcatgatggaattcaggcgcggcgccgaataccgtttaacggtcagcgggcgacgtattttgtcctaccgaagaaagatgttgtttcagcaaatcttccggcggcggcggcaattgtaaataatagccctgctcgcttaacgcctgttttactttttcgagctcggcattgactaattttttacgtccatcaagcggcagcatcatcgctaactgcggctgaccgaatcctttcatcaacgcttcaggcacccgcgaaaaatcgtcttttttttcgacatacaaataggtttgatcgcgcttgctacttctatagatcacacaaaacatacttttactctgaattaacgggatggtgacttgcctcaatataatactgactataacatgccttctggacttcggaatatcactccgtatcggagatgataaatagcaaattgagtaaggccaggatgtcaaacacgccaatcgagcttaaaggcagtagcttcaccttatcagtggttcatttgcatgaagcggaaccagaggttattcgtcaggcgttagaagacaaaatagcgcaggctcctgcgtttttaaaacacgcccctgtcgttattaacgttagcggtcttgaaagcccggtaaactggccggaactgcataagatcgtgacctcaaccggcttacgcattatcggcgtgagcggctgtaaagacgccagcctgaaagtagaaatcgatcggatgggtcttcctttactgactgaaggtaaagagaaagcggttcggcctgcgcccgttgagccggcaacgcccagcgaaccgccgcaaaacgctaatcccatcacaaaaacgcgattaattgatgttccggttcgttccggtcagcgcatttatgctccacaatgtgatctgattgttacaagtcacgtcagcgctggcgcagagcttatcgctgacggcaatatccatgtctatggcatgatgagaggtcgcgcgctggcaggagcgagcggcgatcgggaagcgcaaattttttgtacccatctgacggcagaactggtctctatcgcaggtgtttactggctgagtgataaaatcccggcagaattttatggcaaagcggcgcgcctgcgtttagcagacaacgctttgacagttcaaccgttgaattgatccctttttaacaaggaatttttatggcacgcattattgttgttacttcgggtaaagggggcgttggcaagaccacctccagcgcggccatcgctacaggtttggcccagaagggaaagaaaactgtcgtcattgattttgatatcggactgcgtaacctcgatctgattatggggtgcgaacgtcgtgtcgtttacgattttgtaaacgtcattcagggcgatgcgacactgaatcaggcgctgatcaaagataagcgtactgaaaatctcttcattcttccggcgtcgcagacccgggataaagacgcgctaacgcgcgaaggcgtcgctaaggtactggactcactgaaagcgatggactttgagttcatcgtttgcgactcgccggcgggtatcgaaaccggggcgctgatggcgctctattttgccgatgaagcgatcatcacgaccaacccggaagtctcttctgtccgtgactcggaccgtattctgggtattctggcatcgaaatctcgtcgcgcagaaaatggcgaagaaccgattaaagaacatctcctgttgacgcgctacaatccaggccgcgtcaataaaggcgacatgctcagcatggaagatgtactggagattctgcgtattaaactcgtcggtgtgatcccggaagatcaatccgtactgcgcgcatcgaaccagggcgaaccggtgattcttgacgccactgcggatgcgggtaaagcctatgcagataccgtagatcgtctgttgggagaagaacgtcctttccgcttcattgaagaagagaagaaaggtttcctcaaacgcctgttcggaggataaattatggcattactggatttttttctctcgcggaaaaagagtaccgctaatattgcaaaagagcggttgcaaatcattgtcgcggaacgtcgccgtagcgatgccgaaccgcattatttaccgcagttacgtaaagatattcttgaggtcatttgtaaatacgtacaaatcgatccggaaatggttaccgtccagcttgagcaaaaagatggtgatatctccatccttgaacttaacgtaacgctgccggaagccgaagagtcaaaataagctcttttatgggaaaattcctggattaaaaaaggcagaagaatctgccttttttatttttttacattattccgaatacggacatttatttcactggccgttttcccggcaattaccgtcgttaaagcggatactcctgcaacagaagagttaacttctcctccatcagttcggcgcgccagccggaaatcaattccggttgcccattttgcggttttaatttccagtgccagttaagcaactgattaatctgccgacgcgatgccagtagctcgccgctgacgtgatgcgacgcgctcacctccgccaccagcgctttgatggctttaaacgctttgcgatagcccggcatgtccatcagattcaacaggggttccggcaatgcctcttccggtagcgcctgtgctttcgccaccagcgatatcaacgtcttgccatgaaaacgaatctcgctgccggaaagccccaggctatccagctcaccgagactgcccggcatataacgcgcgaccgcccacagattttcttcacgcacaacaaagttcaccgccatatcgcgctcacgcgccttacgtagccgccagtcagctaaaagttgcagacaggctaactggcgagtacgcagttgccaggcattggtgatatcccgccatgcttcttccggcgcctgaatctcctgacggcgctgctgcatcaaccgacactcatcaagcgcggcaggcagccatcctgcggcttcagtttcaatcatcagctttttggcgatcggtaacagataccagacatccgccgccgcgtattcacactgacgttcgcttaaaggccgggctaaccagtcggtacgagactcgcttttgtccagcgccacgcccgtatactcttctaccatcgacgcaaaaccccacgacagcggacgcccgcaaaacgccgccagaatttgcgtatcaatcaggggttccggcagttcgccaaacgcattcagaaatacttccagatcttcgctacccgcgtgcagaaatttggtgattcccgtatcgcgcaacaccgcttttaacggcgaccagtcgctgatgccgagcggatcgatcagggcgacatttgccccgtcaaataactggatcaatcctaactgcgggtaataggtgcgggtacggacaaattccgtatctaaagcaatagccggacatgcgcggacagcctcacacaggctcgccagcgcatcgtccgtttcaatcatttggtaattcaaatcgtgttctctttggttcgcgccaaaataaatatcctccggcatagccggaggtttttcagatgcgcctataaggctctcttaccagccgcgccctaacaggcgcatacgatctgacatttgcatcaaacttcgttacttacggcccgtaaacgggctgcccggatacgggatcgataattgctcacccattttatcctcttcaagctggtgctttatgtagtcctgtatcttcgccgtgttcttacccaccgtatcgacatagtaccctctgcaccagaactccctgttcctgtatttgaattttagatccccaaactgctcgtaaagcatcagactacttttacccttcagatatcccatgaaactcgacacactcatcttcggcgggatctccagaagcatgtgaatatgatctgcacaacattctgcttccagaattcgtacgtttttccattcacacaattttcttaatatgctgcctactgccctacgcttctctccatagaacgcttgtcttcggtatttgggcgcgaaaactatgtgatatttacagttccatcgggtgtgcgctaagctcttttcgtcccccattgggacccccttttgatttcttgttgaacttttgcagttgccagaccgcaagatgttttaacaaatcaaaaggggttttaataactggcttaaagctgaaagctttccggaacccccagcctagctgggggttttccatagacaaaaaaacgccggcttaaccggcgtctctcgttagctgacttaacgctcaggctttattgtctactttgccacgggcttcgtcacgcagttctcgtcgtaaaattttcccaacgttagattttggtaattcctcgcgaaactcgacctgtttgggcaccttatatccggtcagatggcgacggcagaaggtgatcaacgcatcgtcagtcaatgccggatctttcttaaccacaaaaagcttcaccgcttcgccgctactaccggaaggcacgccaaccgccgcgacttcctgcacgccagaatgctgcatcaccacatcttcaatttcgtttggataaacgttgaaaccagaaaccagaatcatatctttcttacgatcgacaatccgcagaaagccgtcttcatccataaccgcaatatcgcccgtatgcagccagccatctttaatgatttcatccgtcgcgtcaggacgctgccagtatcccagcataacctgcgggcctttcacgcaaagctctccggcctcacccggcgcgacttcgttgtcatcgtcatccaccagtttggcttctgttgacggtactggcaggccgatactgccgctgtgataatcaatatcatgcgggttgacgctcaccagcggggcgcactcggtcagcccgtagccttccagcaggtattgcccggtcagctttacccaacgttccgcaacgacgttttgcaccggcatcccgccgccggctgacagatgcagcgaagaaaaatccagctgttgaaactctttattattgagcagggcgttgaataacgtattaacgccagtcatcgccgtaaatggatatttcgccagctccttgaccagaccggggatatcacgcggattggtaatcagcaggttttgcccacccagctcgataaaaagcagacagttcatggttaaggcaaaaatgtgatacagcggcagcgcggtcactaccagctctttccccgggtgcagcagcggcccataggtcgctttcacctgctccagattcgccagcatattgcggtgggtcaacatcgcgcctttcgccacgcccgtcgtaccgccggtatattgcaggaaagccagatcttcagcgacaacctcgggtttgacatactgcatacggtagccatgctgtagcgcgctgcgaaacgagatcgcatctggcaagtggtattttggcaccagacgcttgatgtatttcacgacaaagttaacaaccgtacctttggcggtagaaagctggtcgcccatccgcgtcagaataacgtgctgtaccgacgttttctcgactactttttccagcgtatgggcaaagttagaaacaataatgattgccgccgcgccgctatcgttaagctgatgctcaagttcgcgcggcgtgtacagcgggttaacgttcaccacaatcatgccagcgcgtaaaataccaaatagcgcgacaggatactgcaacaggtttggcatcatcagcgccacacggtcgccttttttgagtcccagcccttgttgtaaataagccgcaaatgcccgactacgttcttctaatttacggaaggtcattacctcccccatattgacgaacgcaggctgatcggcatagcgcgtcgccgcatgttcaaacagttcaaccagggattgataacggtcagggttgatctccgccggaacatcagcaggataacggttaagccaaaccttcttcaatgcatcacctctaaaatgagtgttcgtcgtcatcacaaccccagttaataaacaagtcgttaacattatattaactcagcgtaccagtttattaattacgcaactgaaaggttgcgaagcgcgtcactatttatttttattatgtctctatgaatgcagaaacagcggaccagccgctgtttcttttattgataaaacaaagagttactctgttactatcgtctgaacctccgcgggtccagggttataccatccccaaccgccatagccataaggccaggcgcgtccgccgtaaaaccacggatcgatcggctgtggaggcatgacgacctgctgaacaagatgccagcgtttatagccggtagcctgcatcagcataaatttatacggcgtattgccgattttaccgtcaaccgtgccggttatcgggccgacaacggtaactaactggccacggaagtccaccgggtccagaaaaccgttcacatcggcaaaaattctgccgcgcgaggcttcgcccagaacaggacgcgcgccgctatcaagcggtacggtcgcgatttcaagccgggtttttccctgctgattttgcaccgccacaactttgccgccaaaacgcgcctcttgcccgatatagagctgcggcgcattcatcacccgcaccaaatcctgctgcggcgtcggactcgaacctttaatggcatccgggatagtcacgcaaccgctcagcataagcgcaaaagcgcacgccagcgccccttttattaaccgtttttgaaccgccatgatgcgactcctttttctcgacctctattccaccccacagcataaagtatgggggtaatagtagtgagagtcattctttgccgggaagtttcttccacgccacttcgttacgcaaataaaccggctcggcatgttccacggcaacggtctctcctgccgccagcttttgactggcgatgggcaacatatcttccgctgccgggagcgacacctccccatcatgaagcgtcaggccgcattccttcgccagatcgggccacgcggaccaacccgttcctacggtcgcccactcgccggaaagctgtttcaaccgctcgccgacccgttccggtttcagcaccgcttccgtctcttcgccctgccagacgccctgcgcatcacgctggtattccgcccagtacacttcgcccatccgcgcatcaatcgcggcgagtacgcgggtcgcgccggttttacgccatgcaccctgcgccatcgtggcaagcgttgaaacaccgatcatcggcagatttgcccctaacgccagcccttgcgcaataccaatgccgatacgcacgccggtaaagctgcccggaccgcgcccaaacgccagcgcatctatctcattgagcgaggcgccgctggcggccagaatctcctgcaccatgggcaggatacgttgagtgtgttctcgtggacaaagctcaaagtgagcattgatagtaccgttgttccacagggcgacagaacaggcctctgtggcggtatcgatagccagaattcgcatgaggtttcgtgcttagatcaataaaatagcgcgcatcttaccatactccgtaacaaattactcggcggatggaatcgcaagaaagcgaacggcacgggcgatatcacgcgtgcgcggcgcaggaggcaggctggcgagaaacgtggcgccatagggccgcatcaccagccggttatcacaaatcactaacaccccgcgatcgtccgcatcgcgaatcagccgccccaccccctgcttcagcgtaatcaccgcgtcgggcagttgaacctcatcaaacggatcgccaccgcgcaaacgacagtcttccattcgcgcttttaacagcgggtcgtccggggaggtaaacggcaatttgtcgataatcaccaacgataacgtatcgccgcgcacgtccaccccttcccagaagctgctggtggcgacgagcagcgcgttgccggcgctaacaaattgctgtaacagttggcctttactggtttccccttgcaacaataccggcagcgtcatggtggcgcgaaactgctccgccaaatcgcgcatcatggcgtgtgaggtgcacagcataaaacatcgcccgttattggcttcgataatcggcctgagcatagccgccaactgtcgcgccgcgccgggctggttggtttgcggtaggttacgcggtacgcagagtaacgcctggcgcgtatagtcgaatgggctgggcagtagcatggattctgcctgttcaattccaagacgggcggtaaagtggtgaagatcatcatttaccgacaacgtggctgaggtaaaaatccagctaccgggcttctgttccatcacctctttgaatttgtccgccacggtgagcggcgtcagcgccagggtgaaatggcgcgaggtgcactcataccagtagctgtatcccggctgattgatctcttttaagcgtttcagccgtgaacggtatagcgtggcgcgttcaaaagccgcatccagcagcgccgaacggcccagcgacagcttcgccacgtcgtaacaaagctccagcgtatcatccagcagtaaaaatgcccgttggatacgtgagtcggctaacagttcacgcaaatttccccggtagccgggctcccccagttgcagacgaaaatcctgggcgctctgggcaaggcgatcggcgcatttttgcaactgttgagtgtctttcagttccgtccggtaggcgatggtgatgtcttttgctaaatccagcaactgacggctggagagcgattgtccgaaatactggctggcgatgtcaggcagttggtgggcttcatcgaagatcattacttcagcctgagggataagttcgccaaacccgctctctttaaccaccatatccgcaagaaataggtggtggtttacaatcaccacatccgcgtccatcgcctttttacgcgctttcaccacaaagcactctttgtagagcgggcaatcgctgccaaggcagttgtcgttggtactggtgaccaacggccaggcctgggaatcctccgccacgctgacgcaggtgctgatatcgccatcccgcgtctgatttgaccaggagcgcagcaatatcacgtcgcttaacgtttgtaccggtaaatcgccgcccgccagcgcttgttgttccagccgctccaggcagaggtagtttgaacgtcctttcaacagggccgtcttaccggtaaacgccaacgcttttgctaccgtcggcagatcgcggctgtagagttgatcctgcaacgctttcgacccggtcgaaataatgacttttttcccggcgcgcaacgccggagcgaggtaagcataggtcttcccggttccggtgccggcttcaacaaccagaggctgcgcattttcaatcgcttgtgttacggcaaccgccatttgtcgctgtggttcgcgcggtttaaagccggttatcgctttggccagttggccatctgctgcaaaatcgtccgtcacactgccccctgttaatttgcacagggattatgtcagggtagaaaggcttacgccagttacagaggtgacggcggcgccacattgtggcagtcttgaaccattcaaatgaaaagcaaatgaggaataagtaatgtctatcgtgcgtattgatgccgaagatcgttggtcagacgtggtgatctacaataatacgctgtggtataccggcgtgccggaaaacctggacgccgatgcttttgagcaaacggcgaatactctggcgcaaattgatgcggtgctggaaaaacagggctccagtaagtcacgtattctggatgccactatttttctgagcgataaagcggattttgccgccatgaataaggcgtgggatgcgtgggtcgtcgcaggccatgcgccggtacgctgtaccgtacaggccgggttgatgaacccgaaatataaagttgagattaagattgtcgcggcggtataagccggttattcgtcttcatcctcaaaacgcgccactatccgttcgccggtatggttggcgcgaagttcgcccgccacctgggcaatcgcttctccgctactcataccttgcgacatcaattcctggatacgttctacggctttttgctgttgttcatgactgagtgaaggtaaacctgcaaacatgattaactcctgctaaattgttagcgctaattatttcacgctacccggcggtaagccagtagtgttgtaacgagtcaggaatgatgaagacgttatctcccactgttatcaccttaccctggcgtccggacgccgctgaacactattttgcgcccgtaaaccatttgccctgggcgatgctgctgcattcaggtgatgctattcatccctataaccgttttgatattctggtcgccgatcctgtcaccacactgaccacgcgcgcgcaggaaaccacggtatgtactgcgcgcacgactaccgtcactctcgacgatccgttacacgttttgcagactcaactggaggcgctgccttttcatcctcagcctgaccctgacttaccctttcagggcggcgcgctgggtctgtttggttatgatttagggcggcgtttcgaaattttgcccgatactgccgcgcgcgatatcgctttacccgatatggcgattggcctttacgactgggcgctgattgtcgatcaccaaaaacaggtggtgtcgctgataagctatcacgatgcagacgcccgatatcgctggctcaccagccagcgcgcgccgacccgcacgcccttcaggcttacctcagcctggcaatccaatatgacgcgttgcgagtatggcgagaagtttcgtcaggtgcaggcctggctgcacagcggggactgctatcaggtcaatctttcccagcgttttcaggcgagctacgagggtgatgaatggcaggctttcgaacgccttaaccgcgccaatcgcgccccgttcagcgcctttcttcgtttacatgacggcgccatattgagcctttctcccgagcgttttatccaactggagaatggtcatatccagacgcgcccgatcaaaggtacgcttccacggcttaacgatccgcaggcggatcgtcagcaggcgcagaaactggctaattcaatgaaagatcgcgctgaaaatttgatgattgtcgatttgatgcgtaacgatattggccgggtcgccgtaccaggttcggtgaaagtgccggaactgttcgtcgtcgaaccatttcctgccgttcaccatctggttagcaccattaccgcccgtttaccggactcgcttcatgctaccgacctgctgcgcgcggctttccccggcggctccattaccggcgcgcctaaagtgcgggcaatggaaattatcgacgaactggagccgcagcgacgcaacgcctggtgcggtagcatcggttatctgagtttctgcggcaagatggataccagtattactatccgcaccgtcacggcaacgcagggccaactctattgctcagccggcggcggtatcgtggccgatagcaacgaagaagcggaatatcaggaaacttttgataaagttaatcgtatcctgcacccactggagaactaatacgtggataccagccgtctgacgctcgatcatttcttatcgcgctttcagcttttgcgcccgcagatgactcatgaaacgttaaatcaacgtcaggccgccgtactgatccctgtggttcgccgcccccagccggggctgctgttgacccagcgggctattcatttgcgcaaacacgccggacaggtcgcctttcccggcggggccgtggacagtaccgatgcttcgcttatcgccgcagcgcttcgcgaagcgcaggaggaagtcgccatcccgccgcaagccgtggaagtgattggcgttttaccgccggtagacagcgtgaccggttttcaggtcaccccggtggtcggcattattccgccaaatctcccctggcgcgccagtgaagacgaagtgtctgcggtgtttgaaatgccgctggcgcaagcgttgcaactggggcgatatcatccgcttgatgtttaccgtcgcggcaattcgcaccgcgtatggctctcctggtatgagcattatttcgtctggggcatgaccgcaaacattcttcgtgagctggcgctgcaaattggcgtaaagccctgactgtacacaacgccattcacgttgcctcaaggcggtaacaatcgcctcccccaaagaggcagcctgaagggcaacgtgtatatacttaactttacgcgcgtaagacacgacttgagattactgtcgcaatattagtaaaaacgcggttattcattagtttaattcatgtgaatagttaagctgatgccagcgttccctcttacactatgcgcagttataacatcgtaaccggaagccccggttgccctgtcaggagtattatcgtgattagcctattcgacatgtttaaggtagggattggtccctcctcttcccacactgttggcccgatgaaggccggtaaacagttcgtcgatgacctggtcgaaaaaggattactggataacgttacccgcgtcgctgtcgatgtctacggctcgctgtcgctgacggggaaaggtcaccataccgatatcgccattattatgggtctggcgggtaatgaacccgctaccgtggatattgatagtatccccggttttattcgcgacgtcgaaacgcgcgagcgtctgttactggcccagggacgtcacgaagtcgacttcccgaaagatgacggaatgcgttttcacaacggcaatttgccgctgcatgaaaacgggatgcagatccacgcctggcatgacgacacggtcatttatagcaagacgtactattccatcggcggcggctttatcgttgatgaagagcatttcggccaggaagcgacgaatgaggttactgtaccttatccgtttaaatcggcgaaagaaatgctggagtattgcaacagtaccggcctttcactctccggcatggtgatgcaaaacgaactggcgctgcatagcaagaaagagattgaagagtatttcggtcacgtctggcagaccatgcaggcctgtattgatcgtggtatgaataccgaaggcgtgctgccggggccgctgcgcgtaccgcgtcgcgcctctgcgctgcgtcgtatgctggtttccagcgataagctttccagcgatccgatgaacgtcattgactgggtgaacatgtttgctctggcggtgaacgaagagaacgccgcaggcggccgcgtcgtgacggcgccaaccaacggcgcgtgcggtatcgttcctgcggtactggcttactacgaccattttattgaatcagtcagcccggatatttacacccgctacttcctggcggcaggcgctattggcgcgctgtataagatgaacgcgtctatttccggcgcggaagtcggctgtcagggcgaagtcggggtcgcctgttcgatggcggcggcaggccttgctgaactgttgggcgccagcccggagcaggtttgcgttgccgctgaaatcggcatggagcataacctggggctgacctgcgacccggttgccggtcaggtgcaggtgccgtgtatcgagcgtaacgccattgcttcggttaaagcgatcaacgctgcgcgtatggccatgcatcgaaccagcgcgccgcgcgtctcgttggataaagtcatcgaaacgatgtacgagaccggaaaagacatgaacgcaaaataccgcgaaacgtcgcgcggcgggttggctattaaagtccagtgtgattaaacgccgtttcccctcccttcgcccatctgctacggatgggcgaaatttttatctcttcctcgtcgactccacgtttccccactacacttgctgtgtcgcggttggcttttgtcgccaacgcttattgggcggcccgcatgcaaacagcacaacggatcatcaatcattatcgccgtaatcgtttcattgtttgcacgatttgtgcactggtcacgctcattcttacgctgaacatccgatttatttcggagcggaacttaaatcaccatcgcacggttgcattcgcgaatcatgccgttgatgcgctggataatgtgctgcatcctctcctggtcggacgaaacatactgctccccttgcttgagcttccgtgcgcgaccgcgcatttgccgttgcgtaagcaagccgcccgcctacaaaccattcgttctatcgggctggtaaaagagggaattctctattgctcaagcatttttggcgcccgtaatactcccatacgccagcttcagcccgatcttcccgcagtcggcgatctgctgctactttccacagaccaatcgttactcaagggaagcccgatcctcattcagtggtatcccgcctctgccgatggccaggatggcgtgatggaaattgtgaatattgacttgctgacgactatgctacttgagccgcagcagccgcaaattaccagcgccagcctgacggtcggcaaacgacacctgttatatggtcggggcgtggtcgatactcttccggaattaaaaaaagatgaagagcgttaccagctttcatcgcgacatttcccttttactatcagcgtcagcgggccgtcggcaggcgtactggcgttcaaacatctcccgacgcagttaccgctggccgtattgcttagcctgttgatcggttatatcgcctggctggcaacggccagcagaatgagcttttcctgggaaattaatctggcccttgccgaacgggagtttgagctattttgtcagccgttgcttaatgcccgcacgcagcagtgtaccggcgttgagatcctgttacgctggaacaacccgcgccagggctggatctcaccggatgtttttattcctatcgccgaggaacataacctgatagcgccgctgacccgctatgtgattgcggaaaccattcggcagcggcactacttccccatcaaccatcagtttcatatcggcatcaatgtagcggcaagccatttccgacacggcgtgcttctcaaagatcttaatcagtactggtttagtgcggaacctgttcagcaactggtgctggagctcacggaacgcgacgcgttgcttgacgttgattaccgcctgatgcgcgagctgcatcgtaaaggcgtgaagttagccatcgatgattttggcacaggaaacagctcgctctcctggctggaaaaactgcggccggatattttgaaaatcgataaatccttcaccgccgccatcggtaccgatgcggtcaattcaacggtgaccgatattattatcgcgctggggcaaagactgaatattgaactggtggcggaaggggtcgaaaaccagacgcaggcacagcatttgcgccagcatggcgtgcaaatgttacagggctatctctatgcgaagccgatgcccattagcgaatttccacagtggctggcgggcagcgcgccgccgcccgcccggcataacggacagattatgtccgcgatgccgcatctatagacttgattcctgcgtgtgacgttattcctcttcgtcgtgggcaggctgttctttaacaattcgaaccagatcgacacgatagtcgttggcctcgacaatggtgatccgcaggggcggaacatcaatgacatcgcctacacgaggaatatggccattagcggcgatcactaaccccgcgaccgtcgcaatatcgccctcttcgttcaccagatggtcaacttccagcgcctgctgtagcgcatggagatcggtgccacccttcactatccagccctcggcatcggcaacgatttccggcgtttcatcggcatccgggaactcaccggcaatcgcttccagcacatccagcggcgtaaccagcccctgcaccacgccgaactcgttagtgacgataacgaaactgccgcgcgcgcggcgcaaaacgcctaacagattgataggatcaagcgtttccggcaccactatcgccggggaagacgcggcgatagccgcaacatccgcgccctcttccagcgccaccagcaactctttcgcgcgaacgataccgataatttcatccagctcgccccgacataccgggaacaggctatgcggagaagagagtaactgctgacggatttcagctacgctgagattcgcatccacccaactaatttcgcctcgcggcgtcataatgccgcgcagggagcgcgacgccagagtcagtacgccgttaatcatgtagcgttcttcttcggcgaaggcgccttccgacaccgatatcgcggccgggctatccgtttcatgttgcgtactcgcctggcgtttaccgcccatcagacgcaggatagcgtccgcagtacgcgcgcgcagcggcaacgtggactgatgacgaataaagttgcggcgcgcaatctggttaaacacctcgataacgatcgagaaaccaattgccgcgtacaggtagcctttcggaatatggaaaccaaacccttccgccaccaggctcaagccgatcatcagcaggaaactcagacagagcaccaccaccgtcggatgctggttgacaaaacgggtcagcggttttgacgccagtagcatcaccgccatcgcaatcaccaccgccgccatcataaccggcagatggtttaccatacctaccgccgtaatcacggcgtccagcgagaagaccgcatccaggatgacaatctgcgtgactaccacccagaagctcgcatagcctttaccgtgtccggtgtcatgctcgcggttttccagacgttcatgcagctcggtggtcgctttaaacagcaggaatataccgcccagcagcataattaaatcgcggccggagaaggtaaaatcccagacggtaaagagcggctttgttaaggtcaccagccacgaaataatggacagcagcgccagacgcataatcagcgccagcgagagcccgataagacgcgctttgtcacgctgctttggcggcaatttatcggcgaggatcgcgataaagaccaggttatcgatacccagaacaatttccaggacgacgagcgtgagtaaacccacccaaattgagggatccattaataattccatgacaagctcctgcttaaggaatgactaaacggcgcccacaacatctcaaaggatgcaggcggtaacgcaataaacaaagtaaggctatggcaagatatgccagattgacaggcgcaaaacggccaaagagtgaaatgacgtcggtgacgatccatacaacgggctgctgccctataccccattctaattaaacggaagctaaacataacagagacaactggtttttggcaaagatttaccttcctttgcaaagagatgtaaccaggatattttacacttcgaaatttctcattatcgaaaacaaaattacggatctccatcacacaaaatatttttttcgatatctaaaataattcacgaaaatcatgcgtttttcgttgtaaccctcatctgaatcgattcgcttgcggacggcgattcaaaaaatacatctgtcaagttgatgtgttgacaataataaaggaggtagcaagtgaccattgctattgttataggcacacatggttgggctgcagagcagttacttaaaacagccgaaatgctgttaggcgagcaggaaaacgtcggctggatcgatttcgttccaggcgaaaatgccgaaacgctgatcgaaaagtacaacgctcagttggctaaactcgataccagtaaaggcgtgctatttctcgttgatacatggggaggcagtccgtttaatgctgccagccgcattgtcgtcgataaagagcgctatgaagttattgccggcgtcaacatcccgatgctggtcgaaacgtttatggctcgtgacgacgatccgagctttgacgagctggtcgcactggcggtagaaaccggtcgtgaaggcgtaaaagcgctgaaagcgaaaccggtagaaaaagccgcgccagcgccagtcgccgccgcgccaaaagcggccgcaccggcaaaaccgatgggcccgaatgattatatggttatcgggcttgcccgtattgatgaccgcctcattcacggtcaggtcgctacccgctggaccaaagagaccaatgtcagccgtattattgttgtgagcgatgaagtggcggcggataccgttcgtaaaacgctgctgacgcaagttgcgccgccgggcgttacggcgcatgtggttgacgtcgcgaagatgattcgcgtctacaataacccgaaatacgccggcgaacgcgtgatgcttctgtttaccaatcctaccgacgtcgagcgcatcgttgagggcggcgtgaaagtcacttccgtgaacattggcggtatggcctatcgtcaaggtaaaacgcaggtgaacaacgccgtttccgtcgatgaaaaggatatcgaagcctttaaaaagctcaacgagcgcggcatcgagcttgaggtgcgtaaagtttccaccgatccgaaactgaaaatgatggatttaattgccaaagtggcgaaataaccgccggcatttaattagctttcacacttaagatagcaataggagaagtacaatggagattaccactcttcagattgtgctggtgttcatcgtcgcatgtatcgcgggtatggagtcggtacttgatgaatttcagttccaccgtccgctgatcgcctgtaccttaatcggcgccgttctgggggacatgaaaaccggtattatcatcggcggtactctggaaatgatcgctctgggctggatgaacatcggtgctgccgttgcgcctgatgccgcactggcgtccatcatctctaccgttctggtcatcgccgggcatcaaagcattggcgccggtatcgcgctggcgattccgctggcggcggcaggccaggtactgaccattatcgttcgtaccatcaccgtggcattccagcacgcggcggacaaggcggctgaaaacggcaacctgacggcgctctcctggctgcacgtttcttctctgttcctgcaggcaatgcgtatcgctatcccggcggttatcgttgccatctccgtaggcaccagcgaagtacagggaatgctgaatgcgattcctgaagtcgtcacaggcggtctgaacatcgccggcggcatgatcgtcgtggttggttatgcgatggttatcaatatgatgcgcgcaggctacctgatgccgttcttctacctcggtttcgtcaccgcggctttcacaaacttcaacctggtcgcactgggtgtcatcggcgcagtgatggctattctttacatccagctgagcccgaaatacaaccgtgtagcgggcgcgcctgcagcggctgctggcaataacgatctcgataacgaactggactaacaggtgagcgaaatggttgatatgactaaaactaccaccgagaaaaaactcactccgagcgatattcgcggcgtatttcttcgttctaacctgttccaggggtcatggaacttcgaacgtatgcaagcgctgggcttctgcttctctatggtgccggcgattcgtcgcctgtatccggagaataatgacgcgcgtaaacaggcgattaaacgtcacctggagttctttaacactcatccttacgttgcggcgccggtactgggcgtgaccctggcaatggaagaaaagcgtgcgaacggtgcagagattgacgatggcgctatcaacggtatcaaagtcggtctgatgggaccgctggcaggcgtcggcgaccctatcttctggggtaccgtccgtcccgtattcgcggcgctgggcgcaggtattgcaatgagcggcagcctgcttggtccgctgctgtttttcatcctgtttaacctggtgcgtctggcgacccgttattatggcgtggcttatggctaccgcaaaggcgtcgatatcgttaaagatatgggcggcggcttcctgcaaaaactgactgagggggcgtcaatcctcggcctgtttgtcatgggggcattggttaacaagtggacgcatgtgaatatcccgctggtggtttccaccatcaccggtcaggatggtcagacacgcgttaccaccgtgcaaaccattctcgaccagctgatgccgggtctggttccgctactgttgacctttgcctgtatgtggctgctgcgtaagaaagttaacccgctgtggattatcgtgggcttcttcgtcattggtatcgccggctactccgtaggactgctgggccagtaaggctgttgtacactaccggggccaaacggccccgttttttatttctctggaggataaatgactatcacggacctggtgctgattctctttattgccgcattattggcttacgctctctacgatcagttcatcatgccccgtcgcaatggccccactctgctttctatagccctgctccgccgcggtcgcgtagacagcgttatcttcgttgggctggtcgccatccttatttataacaacgtaaccagccacggagcgcagatgaccacatggttattaagcgcgctggcgttaatggggttttatatattctggatccgcacgccacggatcatctttaaacaacgtggctttttcttcgccaatgtctggatagaatataaccgtattaaagagatgaatttatcggaagacggcgtactggtgatgcaattagaacaacgacgcttgcttatccgtgtacgcaatatcgacgatctggaaaaaatatataaacttcttattgaaaatcaatagcttaagatatagcctcaactatgtttttcgaattttatttcgaatcataatatagctaaggctatattttctattgaccaattgttatttaatttaacgttttattgatgaataaatctaaatgaaaatcgttttcaattgaaagacaaataatattttatcgctgttgttttatattctaaaaatatgttaatgttgcgccgtcaattggggagtagccgatttccagactccggaaatgtacgtgtcaacatactcgttgcaaaacgtggcgcgtacggaccagccgccgctggtcaggcgagaccataggcgcatcaactgctgtgtatttcgtcacagaatggcgacatgcatgtttgctgggggcagtgatgtgtttaatggataccccggtcaggacgttgtcatgcactttactgctactgttcttctcgctttcggcatgtcgatggatgctttcgcggcatcaattggcaaaggcgccaccctacataaacccaaattctcagaagcgttgcgtaccggtcttatctttggcgcggttgaaacgctaaccccgttgatcggctgggggctggggatattggcgagtaaattcgttctggaatggaaccactggatagcctttgttctgctgatctttctgggcggacgcatgatcatcgaaggtatccgcggcggtagtgatgaagatgaaacaccgttacgtcgtcacagcttttggctattagtcacgacggctatcgcgaccagcctcgatgcgatggcggttggcgtcggtctggcgtttttgcaggtaaacatcatcgctaccgcattagctatcggttgcgccacgcttatcatgtccaccctagggatgatgatcggtcgctttatcggcccaatgctgggtaagcgtgctgaaattctcggcggggtcgtactgataggaattggcgtccagatcctctggacgcattttcacggttaacggttacgctgccagagatgaaggttgaaatccgtctggcagctaagtccggcgctggcagccagttgttcccacacgtctggcctggcgcgccaggcaaatggcgtcatttgcaacagtgctacagccgcttcggcggtgagctgcatgtgataagcaaggcgggtactctgctgcaatgtgaatccgtcgagctgctcggtatacggcgcatgtaaacgcacctcatcataaatgagcccttttagttccatcagatgatgcggccctggcgtggcggtaacgacccaaccaccaggtttcaccacacgcgccaattcctgcgccttacacggggcgtagattctgatcaccgcatccattgacgcatcggcaaagggcagtcgatggcttgacgccacacaaaacttcacctgcgaatagcgtttcgccgccgctttgatcgccgttttagcaacgtccagtccaaacgtggtgactcccggcaacgcctcggcaaaagcatgagtgtaatacccctcgccgcagccgatatccagaatcgccgtggccgactgatccagccgctcgcgcaacaggttaatcacggcatcgcgcagcggctgataatggcctgcatcaagaaacgctctcctcgcctgcatcatttcggcgctgtcgcccggatcgcgcgaacgtttatgctgtaccggcagcagattgatgtaaccctctttcgccacatcaaactgatggcgctgtggacatataacgctgttattaatctgcgtaagcggctgatggcaaagcggacaggtaaacgacatgacaactccggactggggcgctaaagggcgcaagtgtaacgcgaattgcgccccgggaaaatcctttacgaacccggaaccgcaacgtggctgccatgcatcaccagaaggtgatctgaatcggctggcataccgtctggctcaacattttccagccgcagcacatcgcccatgatctggctgaatacgggcgcagataccgcaccgccataataagccccattttgcggattattaatcaccaccaccagcgcaaatctggggttacttgccggcgcgacgcctgcggtatatgccacatacttatcgacgtatttaccatcatcgccaatttttttcgccgtcccggttttgaccgcaatacggtagtctcttactgcggcttttgttccgccgccgccaggcaacgcgacgctctccatcatatgttccacctcgtgcaccagttcttccggcattacccgcgtgccgatcacgggcggatcaactttggtgatcgataacggacggtagataccaaagctgccaatcgtggcataaacatgcgccagttgcagcggcgtcaccattaatccatagccaaaagcaaaggtagcgcgatctaaatcactccagtaacggcgtttcggtaataacccgctgctctctccggtgagacccagtccggtaggcacgccgaaaccaaagcttttataagtatccattaatttctgcaccggcatcgccagagaaaggtgagaaacgccggtatcgctggatttttgcaaaatgccggttaatgtcagttccggatagtaaccgacgtcgcggatacggtgtccatcgagagtaaaaggatgggtatcgataacgctgtccggctgcacgatgccctgctgtaacgcagtcataatgaccaatggcttcacagtagaaccgggttcgaaggtgtcgctaatcgcgcggttacgaaaatcgtccaactgcgcgccttcacggttgttcgggttgaaatccgggtagctcgccatcgagagaatttcacccgttgggatgttaatcaatacggcagcgccggattccgctttgttccagatgacggcgttatccagcgcatcttcggtaaccgtttgcagacgttcatcaatgctaagctgaagttcatgagcaggaaccggattcacttccgtaatgttctcaataacgtgaccaaatttatctttacgcaccaatcgggagcccggttttcccgtcagttgcgcgttaaagctcttttcaataccttctattccctgcccgtcgatattggtaaagccgatcaaattggccgctacgtgtccggcagggtaaaaacggcgcgactcttcccgcaggttaatacccggtagattcagtttatctatccattcggcttgctggggtgaaacctggcgcgcaaggtagataaaacggcctgccgggttactgtttacccgttccgcaagcgtactgagagacagatgcagggcgctggccagcgcctgccagcgctcattgtagccaacgccgcctttgcttatgatagtcttcggatcggcccagacagcattaaccggaacgctcaccgctaagggtcgcccttctctgtcggtgatcatgccgcgtggagaggccgtggtcacttcacgaagcgagcgcatatcttcttgtttcaccagtttcgacggcgtaacaatttgcagccatgccacccgccctaacaacaatgccatactgagcagaatggcagtgcaaagtagtgcaaaacgtatgggcgtaaaattacgggtatcgccgtcgcttttctttttcacctgatctccagccgaatcatttttcaggtgattgatttaacgggaaacggccggaaaaaccagaaaaaacaatgctaataacatcgcgcctttgcaacaaatcgctaacgagagcgcatccagacacattttgaaggatattgaattaaaaagccccgcttttagcgaggctttatatctgaggctgacgcgacaaacgcatcaaatcagtggtgtcgatcagatagctgttacgttaacagcagccggacctttctggccgtcctgaatttcgaactcaacgttctggccttcagccagagttttgaaaccattgccctggatagcggagaagtgtacgaacacatctttgctgccgtcagccggagtaatgaagccaaaacctttggattcgttgaaccacttaacttgacctttaatctttgccatttgcaaaattccttagagtgttttctttgcccgtaggcataacatagataaaactgagacattactgcttgaggcactaatataaggttcggcagagaagcggtattcaacgtcaacgtgtttactcaggacttctttactgaaaatgccacacataaacagaactgtacctcgtttaacccaaagcctgttatcacatacaacgttaattatggcaagccatttttaaacgtgtctcgatccgtcgcacaaattacgagaaccttcacaaattgacagcacgtttatgcaacaaaattgcgaaagatatatcctcacgcgctgacggactcctgacaacgtcactgctgaaaagccatttttctaccatagctcaataacttcgcttcttccagtgcatcaaatcacatttaaaagctgtatttttcatatcactttttatgctgagttatgcataaattgtcacaatgataaaaaacaccttttaatcaaaataatagaaaagaaaagcgattttcggcaccgctttttgtgatgttctgcgtctttacagaatgccttaaaataatgaacaaacaatgacaatccataaagagagagaaacgtttcgcttttaatagagaatgagcggtatcacaaaaatgccatatgtccatttgttatacatataaaactatgttgcatataaagccatatattatgtaaggtgttgatgctgtagtatcagttgcaaacggcaacgcggagagatccgacggggaaatggggcgtatggcactggcgccatttgcgccccggtaagcattatcgttctgcaaccagacgaatgatgtcctcatcctcttttggttcgcttgccgctgttgcgggttccgcttctttttctggttcgtttgcttcgcaaaggcgacgtaacaacgcgttttgccgcttctgttgatccaataacgcttcgagcaattctatctgctcgttggcacgggagcttgcccggttgacaaagaaccagagcgccagccccaccaccagaaccaccattgatactattaaagatgcaagagaaaacgcaccagagtttaaaacgtcgttcatttcaccacctcaatgtagagacgtcattctaccactgctacacgggaaggaaatctctggtgtaaaacgtttaccagggaataaatttattgatggcgcaaataccgctgaaaaattgtacatcctgatcgcacatgatattaaacacctgcgcccacagcaacaggcatactaccaccacgatgccgagaacgacccatcgaaattttttcactccactctccgatcttacatcttatgtcgctaaattatcatgagttacttaaaccaggagtaactgtagcggcattatatgtttttaggaatgattcacttgtttcaatcaatgtacacgctactcttattctaactaaaaaagaaaagaggtagtaatgcgtttgatcattcgcgcaattgtattgtttgccctggtgtggataggcctgctgatgagcggctatggcatcctggtgggaagtaaagtgaacgctgcggggctgggtttacagtgccattacctgaccgcacgcggcaccagcacggcgcaatatctccataccaacagcggcattattggcttttccgactgtcccattttcagaaaaatcgccaccgtggtggataatggctaagcggcaataaataatttcacagtgaaactatcaccaataattcccctatattggctgttgttcataagtactgttaaataatattttaataaccgttaaataagccgacagatattatctacttttacgatttcatcccacccgatgttataaaaaaagcagctacatttttcgtagctgcttttttttaacgtcatgctaataacgttgcttagaagggataatcgttgtaacccatttgttcagaaattttacgcgcggcggcgtgtaacatagccacatattcctgtaggcgttcttctgaaaaacgcagcgtcgggaacgaaatgcttaaccctgcgatgactacgccaaaacggtcaaataccggtacgccgatacaacgtaatccttcttcctgttcttcgttatcttcaccgtatccttgcgcacgcacttcatccaacagcggcagcaacgcttcagtgctggtaatcgtgcgtcccgtgctttgcttatactctacgccgtcgagaatctgcttaacctcatcacggtcgcgccaggccagaagcactttaccgatggccgtactgtacagcggattacgacgcccaatacgtgagtacatccgcagattgtacatagagtcaattttatggatatagacaatgctgtcttcatccagcgcgccaagatggatagtttcttttgtcagacgagacagttcgcgcatctgaatgtccgcactgcggatgagatcaacattttgcaaagctcgcgcgcccagctcaaacagctttagcgtcagagagtatttttcagactccccctcctgagccacgtagcccagcgttttcatggtttgcaaaaagcgataaacggtgcttttcgacatcatgacgcgctgcgatagctcggtaatccctatttcacgctcttcacccagcgcctgcagaatgccgaaaactttcagcacagaagatacagaatcaggctgcttatccagatctgcgtttgccatttatcacctcattacgagcgttttataaaattcagaacgagtttttattataatttcacgccaggtcgcccgcaatccatctttgcttacttcgttacaaatctgcgacataacaactcagtattaatgctaacattattattcagctcataattccccttattacaaaatacttatggaaaaaacacgggccgatggcctgcccctcccgcagagatacggcgctatcctgacgattattatcggtatttcgatggcggttctggatggcgcaatcgctaatgtcgcgctgccaaccattgcgactgatttacatgcctcccctgccagctctatctggattgtcaatgcgtaccaaatcgccattgtcgtctcactgctttccctgtcttttttaggcgacatgtttggttatcaccggatctataaatgtggtttagtggtatttctgctttcatcattgttttgcgcgctttcagactcgctgcagatgctgacgctggcgcgcatcgcgcagggatttggcggcgcggcgctaatgagcgtaaacacggcgctgattcgtcttatctacccccagcgtcatctgggacgaggcatgggaattaactcttttatcgtcgccgtctcttccgccgcgggtccgacgatcgccgcggcgattttatccatctcatcatggaaatggctgtttctgattaatgtcccgttaggtatcatcgcgttaattctggccatccgctttttaccagcaaacatcgcccatgacactaagccgcgctttgacttaccgagcgcggtaatgaatgcgctcacatttggcctgctgattaccgcattgagcggatttgcccagggacagtcgctaacgttgattggcgcagagctgctcgttctggtcgtggtcgggtttttcttcgtgcgccgccagctttctttgcccgtccctttgttacccatcgacttgttacgcattccgcttttttcactctcgatcggcacgtcaatttgctcgttctgcgcgcaaatgttagccatggtctcgctacctttttatctgcaaaccgtgctgggccgtagcgaagtagaaaccggcctgttattgacgccctggccgctggcaacgatggtgatggcgccgctggcgggatacctgatagaacgtcttcatgccggtttgctgggggcgctgggaatggtgataatggcagccgggttgtttgcgctggtcatgttgcctgcctccccctccgatctgaatattatctggccaatgatcctttgtggcgcagggtttggcctgttccagtcgccgaataatcacaccattatcacttccgcgccgcgtgagcgcagcggtggcgccagcgggatgctgggcacggcgcgactgttaggccaaagtactggcgccgcgctggtagcgctgatgttgaaccagtttggcgatagcggtacgcatctttcgctgctcgcagcggcgatcctggcgactctcgcggcggtagtgagcggtttacgtattacgcaaccacgcgttcaggcgtaaaaaaagcgcgtcattcgacgcgcttttcatacttgccagtgggcttattatttcaggtactcgccgctacgcagcgcttcaatgcgtttatccagcggtgggtgcgtcataaacagctcgcttaacgatttcgatttaccgttaatacaaaacgccatcatgctggtcgcttcttgcggctcgtagctggttttcaggcgctgcaacgcggcaatcattttttcacgaccaaccagcttcgccgatcccgcatcggcatgaaactcacggtaacgggagaaccacatggtgataatgcttgccagaataccgaagaccagttccagcaccgtcgcaacggcgaaatagattagcggattaccgttacttccttcgccttcatcacggttgccgcccagaaaacctgcagcaatttgcgcgataatgcgcgaaataaagataacgaaggtgttaaccaccccctgaatcaacgtcatcgtcaccatatcgccattggcaatatggctgatttcatgcgcaatgacggcttccgcctcgtcagggctcatattttgcaacagaccggtgctcacagcgaccaatgaggcgtcacggcgggcgcccgtcgcaaacgcgttaatgtccggcgcatggtagatagcaacctgcggcatggcgataccggcctggcgcgcttgcgttgctacggtgttcatcaaccagcgttctctttcattgcgaggctgttcaataacttcccctcctacggattttaacgccatccatttggacatcagcaatgaaataaaagaaccgccaaaaccaaacagcagcgccatgatcagcaagccttgcacgctgctcgactgtatccccgtcaggctcagaaccagcccgaaaacgaccatcacggccaggttcgtcagcaggaagagcgcgattcgcatcataattttcttttaacctcaatttaacaaagcgcactatgcgattacccacatcgtatgggtcttatggctattttcaagcatcaccaggcggtaagtcacgagaaaaacacaactttacattttgtagcattatcctgacgacttctgcgcttgttaaaaaaaaacaggcacaattttttgtgcctgtttagcgttacttattggctgccgcctgctccgctggtttttctttttcaagatgcgccaggtccagagcaatcttcaccgtttcatcaaggtatgggtccggctcctggtaatcctttggcagatcgtccagtttcttcagcaacggtttaccctcgcgtttaaaccgatcgttaatacgcgccagacgcagagcgtcttcttcattgttctctttctcacgctgcgcataattcagagagacgatgttgcgcttatccttcatggcattgaaacgtgcgatatccttcatgatgtactggaactcaggatctttggcgatacgcgcgttgtgttctttcaataattccgggccaaacggggccaaatcgtccgatttcacgtatttcgccgcatcaatgctatcccacggcaaggcgttatcttcaaatttttctccggtttccgtctcttcattgccagtcggcatgatgatatccggcgtgacccctttacgctgcgtactaccgccgttgacacggtaaaacttctgaatggtgtactgcaccgaacccagcgcaggccattccgggcgaagcatctgatcgtaaattcggtttagcgaacgatattgctgtaccgtacctttaccgaaggtcggctcaccgacaatcagcgcgcggccataatcctgcatcgcggcagcgaagatttccgatgccgaggcactgaaacgatcgaccagcaccaccagcgggcctttgtagtagaccacgccgtcggtgtcgctatcctcacgcactttaccgttattgtcgcgcacctgaactatcggaccagaagggataaacagaccggaaagcgaaacggcttccgtcagcgccccaccgccgtttgaacgcagatcgataacgatgctgttaacgttctgtttttccagcttctgaagctgaactttgacatcatcggtcaagccaacatagaagcctggaatatccagtacaccaactttttccttgccgacggttttcaccgacattttaaccgcgcgatcttcaagacgaatccgttcacgcgtcagcgtgataatacgcgttttcgtccctttgccagccggcagtatttccagtcgaaccttgctgcctttcggccctttgatcagcgccaccacatcgtcaagacgccagccaataacgtcgaccatcggttttccggcctgccctacgccgacgatacgatcgccgacgctaatcgacttgctcttcgctgccgggccgccggcaaccaatgagttaatgacagtataatcgtcatccatttgcagcaccgcgccgataccttccagagacaggctcatttcggtattaaactgctcggtattgcggggagaaagataattcgtatgcgggtcgatttcacgcgcaaaagcggtcatcgccagcgagaacacatcttcactgttggtctgcgccaggcgacgaatagcgaatttgtagcgacgcgtcagcgtttcgcgaatttctttgtcgctcttgccggtgagtttcaggctgagctcatcgaatttcactttaccatcccacagcgcatttagctcagcctcatctttcggccagggcgctttactgcggtccaggttaaacgtatcgtttccggtgaaatccattggccgttccagcacttttagcgcgtactggtaacgttcaaaccggcgcttttgcgccaggttataaagatcgtaaaaaacatccagcttacccgtgcgcagctcatcgcccaacacggttttctttttcgcaaactgctcgacatcgctcgccaacaaaacgttgtggctatagtcgagaagattcagatagcgatcaaaaatctttgccgaaaatgcctcatccagatcgaactggcgataatgggagcgggtaaaacgcgacgttacgcgctcgctcaccgtcgcatgttgcgtctcttcctttagtacgggaatttgatcggcacgcgtaatatcttccacggcgaaggactggcctgctaatgcaagcaggccagctaacgcggtaagcctaaaaaaagtgttcatgccaggcctggcctccgtttcagaacaccaggtgttctgcgcgtacaatcaaagacatacccgaattcagctgtacacggacaccatctttggtgatttctaatacggtggcatccatcgcattattacccgctttcaccttgagggactgccctacggtcaatactgaaatatcagaaaccggcgtgtgcttctcttcgcgaggcgcacgcggcgctttcgtcgtcggtttatcagcgcgaggtttacgttcagcgccttctttacgacgcgctaccgggcgaggtttacgctcgcgtcgcggcgcgtcttctttttcgccagccgccgcggcagcttcgcgttttttcgcttgctgctctgcgcgctgcgcctgaacacgggctttggcttcttcaagctgcttacgcgcatgttcgacatgctgttcttccagctcgccgcacggattgccatcaaggtcgacgcgcgttgcgcccggcttaacgccgtacaggtaacgccagcttgaagtataaagacgtaaagcggaacgaagttgcgttttgctgaggttcatttcgcccccaactcgctctaccagatcctgaaaaataccaattttcagcgggcgagcttcgccttccgcactaaaacagtgaggaaaacgctcggccagaaacgcgataacttctttactgctattcaacttaggttgattttccatgaaatttcctgattacaacggacgtagccaacaagcagcaggcatgaacaggcgtcattataatgacgccatcagtaattgctacgttatccgttgattatcctgcgacgctcgcaaagaattttttgtaatccgtcgttgcaagcacggtttcaagctgtgcgaccagcgtacgcaggccgtgttcatcttcttcggtaaaacggccaaacgccgtgctatctatatccagcacgccgataatccgttcgccaaccgtgacaggcagcacaatttcggcgttgctggcggcatcacaggcaatatggccgtcaaacgcatgaacatcatcaatacgttgaaccttattctgcgctaccgctgcgccacacacgccgcgaccaaccggaatccgcacacaggcgattcgcccctgaaacggccccaacaccagcgtatcgccttcgaggagataaaatcccgcccagttcacctcggtaaggcgttcgaacagtagcgcgctggtattcgccagcgtggccagaaagctggtttcacctgccattaacgactgaaaatcgcggtttaacgccgcgtatagttctgttttgctcattatataatcacttcgtggtcttactcctaaacacaggctattaaaataagcattaaatgcgttcttgctcaagattattcctgtcatgagttaagattacattattctaacactttgattcacgatacatggctctgaacacctcacacgtcacgccaacaaaaaagctaacgatcaggtcaattagcgaagcgctgccgcgcagccactaccagcgctgccctgaatgcgacatgctgttcagcttgccggagatgagcgctcatcaaagcgcttattgtcctcgttgccaggccaaaattcgcgatgggcgcgactggtcgctgacgcggctgaccgcgatggcggtaaccatgctgctattgatgccgtttgcctggagcgaaccgttactccatatctacctgttgggcgtacgcattgatgccaatgtgatgcacggcatctggcaaatgacgcagcagggcgatccgttaaccgccgcaatggtgctcttttgcgtggtgggcgcgccgcttattctggttttttcaattgcttacctgtggtttggcagccttctcggcatgaatctgcgtccagtcctgctgatgctggaaaaactgaaagagtgggtgatgctggacatctatctggtcggtattggcgttgcctctatcaaagtgcaggactatgcctttctgcagccgggcatcgggcttttagcgttcgtctcgttggtggttcttagcattctgactatgattcatctgaatgtggagcaactatgggaacgattttatccgcagcgccctgctcaacgtgcggacgaaagattgcgcgtctgtcttggctgccactttagcggctatccggatgcgaaaggacgctgcccgcgttgtcatattccgctacggttacgcagaaaacagagcatacagaaatgttgggcggccttgctggcgtctattgtctttttgctgccggcaaacctgctgcctatctcggtaatctacattaatggcgggcgtcaggaagatactatcctgtcgggcattatgtcgcttgccagcagcaatatcgccgtcgccgccgtcgtttttatcgccagtattttggtgccgtttaccaaagtcatcgtgatgtttacgctactgttgagtatccattttaaatgccaacagggactgcggacgcgaattctgttgctgcgtctggtgacatggataggccgctggtcgatgcttgatcttttcgttatctcgttaaccatgtctctgattaatcgcgatcagattctggcttttactatgggaccggctgcgttttatttcggcgcagcggtaattttgactattcttgcagtggaatggctggatagccgcttactttgggatgcacatgagtcaggaaacgcccgcttcgaagactgaagcgcaaattaaaaccaaacgccgtatttcacctttctggctgctaccgcttatcgcgctaatgatcgcggggtggctggtatgggatagctaccaggatcgcggcaatagcgtgactatcgattttatgtcggcggacggtatcgtaccgggccgtactcccgtgcgttatcagggagtagaagtcggcaccgtggaagatgtcagtctgagcaaagatctgcgcaaaattgaagttcgcgtcagtatcaaatcagatatggaagatgcgttgcgcgaagagacgcaattctggctggtgacgcccaaagcctcgctggcgggcgtttccggcctggatgcgttggtcggcgggaattacatcggtatgatgccaggtaaaggcaagcccagagatcatttcgtcgccctggatacacagcctaaataccggcttagcaacggcgatctgatgattcatctccatgcgccggatctcggttcgcttaatagcggttcactggtctatttccgtaaaatccctgtcggacgggtgtatgactattcgattaaccctaacaaacagggcgtgacgattgacgttctgattgagcgacggtttaccgatctggtgaaaaaaggcagccgtttttggaatgtctccggcattgacgccgatctaagcctgagcggcgcgaaggtgaaactggagagcctcgcggccctggtcaatggcgcgattgcgtttgactcaccggacaattccaaacccgccgcccaggatgacacgttcggcttatataaagatttagcccacagccaacgaggggtaatcgttaaacttgagctgcccagcggagacggtctgaaagcggaatctacgccgctaatgtaccagggactggaggtgggtgagctttctaaactgacgctcaaccctggcggtaaagtcaccggagagatgaccgtcgatcccagcgttgttccgctgatgcgggaaaatacgcgtattgagttacgcaatcccaaactgtcgctaagtgacgcgaatatcagttcgttgttaaccggaaaaaccttcgagctggtgccgggcgacggcgaaccgcgcagtgaatttgtggtggtgccgggtgaaaaagccctgctgcatgaggcgaatgccttaaccctgacgctgacggccccggaaagttacggcatcgaaccgggccagccgttaattttacatggcgtaaaaattggccaggtcattgagcgcaacttatccagtaaaggcgtgtcattcatcgtcgcgattgaaccgcagcaccgggatttggtacagggcgacagtaaattcgtggttaacagccgggtggatgtcaaagttggccttgacggcgtagagttcctcggcgccagcgccagcgagtggattgacggcggaattcgtattttacccggtacgagcgggaagatgaaatccacctacccgctctatgctaacctggaaaaagcgctggaaaatagcctcagtgacttaccgactaccaccttaacgctgacggccgaaacgttgccggatgtccaggcaggttccgtcgtgctgtatcgaaaatttgaagtaggcgaagtcatcaccgttcgcccacgcgccaatacctttgacatcgacctgcatattaagccggagtatcgccacctgttaaccagcaatagcgtgttctgggcggaaggcggcgcgaaagtgcaacttaacggcagcggcctaacggtacaggcctcgccactctcccgcgcgctgaaaggggccattagttttgataacctgagcggcgccagcgccagccggcgcaaaggcgataaacgcattctttatgcttcagaaacctccgcccgcgcggtaggcggacaaattacgctgcacgcgttcgacgccggaaaattggcggaagggatgcccattcgttacctcggtattgatatcggccagatccagacgctggaattgatcaccgcacgtaatgaagtgcaggcaaaagccgtactttatccggagtatgtacagacatttgcccgcgccgggacacgtttttccgttatcacgccacaaatttccgcggcgggcgtcgagcatctggatacgattctccagccctatattaacgttgagccaggacgcggcgcggcacggcgcgactttgaactgcaggaagccacgattaccgactcacgctatctggatgggttaagcatcgtcgtggaggcgccagaagcaggctcgcttaatattggtacacccgtcctgttccgcggtatcgaagtgggaaccgtcaccggaatgtccctggggtcgctctccgatcgggtgatgatcaccttgcgtatcagtaagcgttaccaatatctggtgcggaataactccgtattctggcttgcctccggctatagtctcgactttggtctgacaggcggcgtggtgaaaacggggacatttaatcagttcatccgtggcggtatcgccttcgctactccaccaggtacgccgctggcgccaaaagcgcaagccggtaagcatttcctgttacaagagagcgaaccgaaagagtggcgtgaatggggcaccgctctgccacgttaaacaccaggctccggcgtactcgcgccggagcgttttatgctacactgcgcgcctgtttttttgccggcgatacacctgtggctcaacacgctgtctattttcctgacgcttttctgacgcaaatgcgtgaagcaatgccttccacgctctcttttgatgaatttatttcggcctgccaacgcccgttgcgccgcagtatacgcatcaatacgcttaaaatatccgtggctgatttccttgccctaatcgcgccctacggctggtcgctcacgccaattccgtggtgtcatgaaggattctggatcgagcgcgatgatgaagaggcattgccgcttggcagtaccgctgagcatttaagcggcctgttttacattcaggaggccagttcgatgctgccggtcgcggccctgttcgccgatgataatcatccgcagcgggtcatggatatggcagcggcgcctggctccaaaaccacgcagatcgctgcccgcatggggaaccgcggcgccattctggccaacgaattttcggccagccgcgtcaaagttctgcacgctaatatcagccgatgtggaatcgccaataccgcactgacgcatttcgatggccgcgtatttggcgctgcgttaccggagatgtttgacgctatcctgctggatgcgccctgctctggcgaaggcgtagtacgtaaagatcctgatgcgctaaaaaactggtcgccagaaagcaatctggatatcgcggcgacacagcgggaactgctcgacagcgcttttcatgctttacgacccggcggcacgctggtctactccacctgcacgttaaatcgccaggaaaacgaagcggtctgcctctggctgaaagagacctacgccgacgccgttgaatttttgccgctgggtgatctgtttcctgacgctgaccgcgccctcaccccggaaggcttcctgcacgtcttcccgcaaatttacgactgcgaaggattcttcgtcgcacgtctgcgtaaaatgtcatcccttccagccatgcccgcgccggggtataaagtgggggcgtttccttttacccccctcaaaggccgcgaagcattacacgttacccaggcggccaacgccgtcggactgttatgggatgaaaatctccatctttggcagcgtgaaaaagaggtctggctgttcccggcagagattgaatcactgatcggaaaagtccgtttttcccggctcggcattaagctggccgaaagtcataataaaggctatcgctggcaacatgaggcgacgatagcccttgcctgcccgactcatgctcacgcgttcgaactttctgtgcaagaggcggaggagtggtatcgcggtcgggatatttatccgcaaacaccccctgccgctgatgatgtcctggtgacgttccagcatcagccacttggtctggcaaaacgtatcggcgccagaataaagaacagttacccgcgtgaactggtacgtgatggcaaactctttactggtaatagttaaaaggcgcacaaaaaaaccgcactttttgactggcgcttttgcctacgttgactacgctgaaaaatggacggctaaactggtcgtaccacaattagcgtattaacggagagcacgatgatgaaaaccagtgtgcgcattggcgcttttgaaatcgacgatgccgaattacatggcgaatcgccgggggagcgaacgttaacaatcccctgtaaatccgatccggatttatgtatgcaactggacgcctgggatgccgaaaccagcgttcccgccattctcaacggggaacattccgttttgttccgtactcattacgatcctaaatctgatgcctgggtcatgcgtcttgcctgactcaaaaagaacccgtcgccaggcgggttatttattcttccttttctcatttcccccctgcgctaacctctcctacactatcgtgtaaagtagttaacattgaggatgtaatgttcgcgctggtactttttgtatgttacctggatggaggatgcgaggatattgtcgtggacatctacgataccgagcagcattgtctttattcgatggacgatcaacggattcgccatggcggctgttttccggtagaggattttatcgacggcttctggcgacctgcgcagcaatatagcgatttttaaccctggtcgctgataccgctattgtatccgcgctaacgtcaattgcccgccaaataccgcgcccgtatcaatatagtgtacgttggcaaaatccatgcgccgacgcaacggcgtatggccaaaccaaaaatgatcggctccgctaatcccgccgcgcttatttatgagccgttcgcggctccagagaacctgatgtaagtcgacctttttttgccattgataggttgacgcgggataatctgcatgagcgatcacatgcgtgctatggcggcaacgaacttccagtatccagggcagccgctgacaaagaataaaaagcgcttcagcttgcgcagcgtgttcagccgtcaggcgggtaaaccagtcgccaccattcatcaaccacagcgtcgactgcgatgaggcccgcgcatccagcgccatttgttcatgattgccgcgaaccgccgtcatccaggactcacgcagtaaagccaggcagcccaggctgtccgggcctctatcaatgagatcgcccacagaaactaacaagtcttgttgcggatcaaatcgacactcacgtaaccttttcattaacattgaaaaacagccgtgaatatcgccaaccacccagacatgccgccaattctttgcctctattcgctgataaatctcttcaggccgcatcatgtttttcctgtcgttcattatccaggacagatataaaaagatagcgtgtgcagatttttttgcttagtaagcgtgcgctgttgtaaatagcgaatttcaccattagcgagtaaatgctttgttatcatcgcaataaaatataactggctgcgccaggggagggttatcccctggcgcagcgagctactcactatcgcctgttcaccttcaatactcttcctccttaaaaacatatcggaaacataaaccacatcgcctcagcacacgatatagcacactctttagcggagtgatcctcaaggcaaaccagcgccaatgcaggtgtcgttaccgtggcgaccatcgcccccacaaacaggcgcagcacaattttttttaaaggcggcataacctctcctgacagttaacagaccattaatccttatcgagacatcatccgtgcgcgggtatcatagacttaacaacacgcagcgttacaaaaaaagctgtctggttgtgcaggtatttagagtaataacaattattttaagttttaaggttatccatttgatttttatattaaaataaagatgacgacgttttgttaaaagcgtcgccataaaaacgaatatatagtttcagaaaatctgctattaattcatatggttaatagcagtattgtatttactaccatcaggaggcattctgaagatacttattcgcaatattttctatagttaactgaaattgttgtggcgttggcatcgtccccttattaaacagcggcgtaacctctttcataacgattttctcagcatacgctttaaaagatacctgctgattatgatttataaacatatgcggatatttaatactcgcggaagcaatgagggggacgacaaaaggattcgcccctgccccacctggagtaaatacgccattttttatctccccaggtagccccgcattctgcgcagcctctcctatctctttcaaaaagggggtaatactgacccctttactgatgagtaatttacaacattgatctttattattactgtacacggctgataatatggcttcgcatgtctgacgagcataggccggatctttactcgcattacctttgatatccagactattgagcttttgcagcataaaatctttaacagttttactggttaataccgccctaccctcagaagcgttcccacgatgaaaatgggtagtcggtatgtctgtttgttgatgcaggctaaaacgatctgacagactcgtcgacaggctgataaagctatttctaacggcagtaatactttttgcaaaaatgtccttctccgttgttttttcttttactggttcaacgtcacttctatggattctgtagtgctgggtggatagtgttatgttagtcacggtagttctccttttagataactatgcatagctacactttgtttatatttcttgctttcaaaaaatagccaccttctccacaaccatttttactcattgatatttataaattttattttcctgatggattttgttcttctgtcacttagcctgttttttttcggcgcaaggtgatcgacttttatcgaggaacatttttatcgggacaatcctgaacaggtaaaacatcacttcaattcaactactgcgtcacataaaacattcatgaatattattatttatgctgatgttgttacgattttgcccccattcgcaggctggctaccaattatcctgccagcgagttagccgctttttcaaaacctataaagtcgccacgccaaacctctccgtcactgtaatccttatctaaacatcaattaattaactgatttttatatattatgacttttcatgacgttcagaaaaactacaaatgaaatggattgacgcatctattagtggtcaaaaaaacgcgctacgagaaataatcagtaacaattgcaacactattccaatcataacgtaaactatatgataccaggtgattattattgcttttaggtaacatatctgtatggctgcttttaagcaacaatactctaacacaacatataacattataacttacaataggttaacaaatggaattacagcttatgcttaaccactttttcgagcgcgtcagaaaggatgcaaatttcaacgcatttctaatcgatctggaatataataatatcgcttattacatctattttgttgctaccggcaatgtgaaaattatcactcatgcaggccacttcatttctattaaaagcaatagaaagctgattaaagtcaattcaacaccgaatacgcaattaataaaattgatttcagctaaacacttttcgggggagcattcctatgaaaaatactgtactgatctggcaacggcaggcgtttttaaatggattgttgaattaaaccaaaaaactcgacaatactggtcgaaagacaaccaattattatatatagaaaatgtggtcatgccgctttaacaagccagggtaataatagcgtcagtcgtgacatccggcgtgttacgactgcgggttatccaatttagagaccataatgagagtctgactgcgagagttaccctgtgcagtccgaccgacgcagcaacgtttgacacgattctcgacaacagcatctcctggtgcaggagaaatgatattcaaagcgatatcgactaaaagctcaaaatatttgccttctatttatattctatctaattaataccctccaggaagtgtggcataattgcagaatctgtcaggattccgggagcataccggagcgtaatcgaaaaaacatctggagatgtatgagcaaggatgaaatcagttatcaaattctttaccggtactctctggaaaagctatacagtactcttgccagaagagtagataacgtgctgtcattcgccctcgtttttctcggggtcggcgtcaccataaacgtcgggagtccctttattctggggccaggcattgtgggtatcgccatactaaaaagagtactccgcttcggcacgcgatcagcacaggccgaccggcagtcccgcgcctggctgaaactttttaatactcagcaccgctttccttcagataaaacactgttccttgccttcacatcgcttgagcaagacgcgagtgaagtatggtccatgcttattggtcctgccatcgtcatgactgagaccgccctcggaaaaacgcccattgagccattgacggcgggtgaaaaactctgtgcatttttgagcggcgcgacgaaatcccagctagcagatcgcaattgaactgtcttctaaacgcctgcgccataccacagagatttagtataaaattaattaatggagtactaacgctgtcagcaggtttctctgagtgaaagattcgtattatacgcacagcccagtttacagtttatataacagcgctatatgtttttgtatccgtaccatgccgcctacaagcggctgtctgagtacctctagccgtgccagggggtattagctcaaatgtgagctgacatatctatggcacagcgccaaacctaatctgactgtccgccctgtgccagaagcggacgctgatcatggtgtgtacaggccaacaatacgatatattttaaagctacctgattacagctttcataaagctatgggtattcaaatgcagcaaagctataaaccgggcttaattaaataatgcctttgcgaacctactttaggaaagtccggtagcgacatttgaagtatatacccctgtttttcataaaaagggagagcctggaagctaaaggtatctacaagtccatgaacacagcctttccgcaaaccttctttttcggccatcgccataagtttgctccccagaccgcagttccttgcagattcacttacccaaagatagtcgatgcagagccacggaccttttctgtcagcaattaatccgcctaccatttcgccgctttcgtttctgcagtagaccccaagctgcccatttttactaaaatcgacgaactgagcattgtagcttcttaatccggttaatagttcttctttatcaaattcagtaacttgatgtgtgatttgaatgtccatacatgcccaattgaacaagtttgtatttggaatataacgttataaataagttaattaaatgtatcaatagaaagtttgtttttactcctgggggcaggtcacgtccgctactcgcttaaagcaaactgtcagttggagtctgagctggtacaattaatgtgccactggttagaaatcagtaatacgattttatcaggctggtgctctggcctgtcaggatttgaggtatccacccggtttaccagccccctgtatttggcaccagtggaacccacttcccgatccaggatatccagtacccaccaccgaacctctttccccaaaagacatgagcaacctcaagcgccttgtctggatgataaccacggtatgaagtttgataacacgtggaatcagggcgtatggttcgctctccgttcagcaactggacgcccttctccccagcctttcagcgttgaagatttgccagcgctgggtgaagagtataggcgaattatgaaaatcatttctgccgtttatacttcgaaaaagacgttatcaaaaaggtggttcgcaagcgcggagttattaaacctttacttaacgaaatacggtttaagttgcttgaattgcagcagaaagaaaacgacggcttgctgatgctggacaaattaagcaagcatggcatcaatggactgatacgccgtcaataaaaggaagggtgcatggacgatcccgtcacatcaccaatcacaacagaagagcacaaaacaacatttcacagtgtaaaggataaaacacgatgccattttcaatcaaaaacatatgttcaggtccaaaaggacattgcccagaaatctccagccctatacaggacaagccagtaccgaggaattgcacactgacctcaacaacatgcgatatacagagctatacagtattcagcagatggtcctgcagttatgaaatgcgcccacccggtgcagaagaaagaaccccacgactaaaattctcagcaacggagctctcatggctatctaaaacaatagaaacagagaggcgcaacacaaaagaatgagcctgtcagtaattctgtgtaactgcccagttattaaaggtgatcgctcaggcggtcaccgaactcgataataaaacggctcatcgccagccgccagttctggatcggcatactccattttttgacgcatccttgatcgccagataaataacttttcgtactgagtcatccgtcgggaacaccttgcgtttcttaatcgcggcacggatcacgcagttcagggattagattgcgtttgtggtgtagatggccttgcggatatccggcggataactgaagagcgtattgaggttttcccagtgcgcacgccagcttttgctgatttgcggatatttatcgtcccgggctttcgcgaacgcatccatcgccatcagtgccgcctcttcggtcggagcctgaggccgctggtggcgactttgtagcctttccaggctacgtatttcagactgttacgcaccatatggataatgcacagctggatatggggctgcgggaagacgctgtttatcgcatccgggaaacccttcagaccatccacacaggcaatcaggatgtcctgaacgccccgggttttcagctccgtcagcacgcttagccagaacttttcgccttcattttcggccagccacatacccagtaactctttctggccttcggtgttgatacccagtgccaggaagacggctttgttgattacgctgccattctgacggactttgacgacaatgcagtccatataaacaatggggtacagcgcatccggttgccggttttgcctctcagtgacctgctcttttacggcgtcggtgactttagatatcagcgagggtgacacattggcgtcgtacatctctttgaaggtggcgacgatttcgcgggtagtcatgcctttggcgtagagggataaaatttggctgtccatctgcgtaatgcgcgtctggtgcttcttaagcagctgtggttcgaaggtgttttcacggtcacgcggtgtgttgagttctatctcgccgtcatcgcacaacaccgttttggacgagtagccattacgggtgtttgagcctgttttgggcgcatttttctcatacccggggtggtcagccagctccgcattgagcaccgtttcgacggttaatttcgccagcatacgggaaaacgaattgaggtcggcttcggttttaaggcctttagccagttcaaccgcaagggctttgagtttcttttcgtccataattgcctgtctccgttactggagtgaacatatcaaagacaggcaattacacaattttacttacagtctcagttcagtcacattattgatgagcgactgtacgttaagcaaatcaagaccgggatgaaaatcgctctgccactttcgctcaaccttccttccatgggtttacgcctcagtacggtgattgagcgttgccgcctggtaagccgtagcgaataccttatcagcgctggcatacgcaaaaacagcccgaacgggagtattcatcctaatagcctgactaaaaaatttgttgcggcacgaaaattgaccggaataaatttcagtgaaaacccaccgccgtttcacgagatccgcagcttatccggacgactgtataaagacgcttacggcgaagggtttgctcagaaactcctgggacatacttcagagaacaccacgaaactctatctcgatgaacgcgataataaagcttacgtgatgctctgattttgctgtaaaagaaatgttaaactggatttggatctgatataacgaaaaagcccggaatacagaaattctggaaaatttcggaaatttcggaaatttcggattattgatcataagcaactgatttataagaaaaaaagagaccgaatacgattcccgcttacggcaaccattgatatttctctttaaattcataatgttacatattaattaagtgattttaacgattggaatatgttatttttgattctaatagattcaattagttatcactttttacgttttaattcggacatatttcgggccattttgcgtataaatcccccgaccaaacaaattaactgcccaatacatcactcccctcttccattgggggactcccgatgccaaatacccatgtagacgaaggcttaatagtgatgccaacaaaagcgatcgcgaaaagttgaacaggtggctagtttcagattaaacacattggttagtcatcttgaacaagtaaaatccgccgcaactggcaaccattcaatactcgcactatcgaacgatcgccagcttgccgcagcccgttcttgcatacgatgtggctgcggttccatcacatcaggaatgtgaaaatcgggataaacctgccacttaacctgaagcaggtcttcatagcgggtggtataccgaggcgaaagcatttctcttaaggtcgccatataaaaacattctattacaacgagttatctcctcctgcctccgccccggcgcaaagctatagttttttctatctccttgtgaaacaaacaattattcttgctatggcgctgattaacaatcgttcgcgggcaacgtacattcagcgagtttcagagcttcctgacggaattcagccggtgctgtttctggggcttcttactggttgatacagatcctgcctcttacttgagaatttactcatttagccgtatgtccattatgggtggataagatcatttatcatcgtaagggttgaaagcgataagttaaacttgtcctggctcaacaagggacccgactaatgatgagctcttcatcttcaaggcgttttatgccttccagcaagaatagacattaaatcgacaactgctgccaggtcttacaggcgcagtggacaatcgtgtggtaacagcctgagtcatttattatttttctcattcagcataactgcgtcttctgatagagaaatttttatctaaacatataaaaaacacagtgaagaaaacgctacttttttctagctaaaaagctaaattaatttttttacggagaggatcttatgcgcaaggtgtcgatatctatattattcatgctagtttcactgacttgggggactacatggttggccatgcgaattgccgttgaaactatccctccagtgtttgcaaccggaatgaggtttatgtttgcagcaccttttttaatcatcattgcatggttaagaaaaaaaacactgttgtttcctcccggacaacgattattccagtttgtgatatgcatcttttatttttgcattcctttctcactaatgatttatggtgaaacctatgtcaactctgggcttgccgccattatctttgcgaatatgcctgtggccgttttgatagcatcggttttgtttctaaatgaaaaagcgaaactaatgcagatcgcgggcttaactatcgcaatcactgcattgacggggatacttcttgaagaaacgaatacaagtacagagagtcactggcagggtatcactgcgcttatttctgctgtgttaatccatgccataatatatacacaatgtaagaaaagaagttgtactgtctctgttatcacatttaatgcgctcccgtgccttttagctgggttgatactttctgcgacaggatggttttttgaaagaccacaagtatcaaccttctcagtacactcaatattagctaccctgtatctcggggcttttgccggagtttttggtatcctgtgctactttgcgcttcagcaaaaggctaatgccttccaggcttcgcttgtatttcttatctttccgctgattgcggtaagtctggaagactatatttatggatatgctatttcaacacactcaatgctgcttattataccattagttatcgggatatttcttactcttgtcgccagaaatctccctgtaaccagcagatgccgggataactcatcacagaaataatcgatttataataacgcaaataattcctgatgccttactgagctccggctaatgcggggtggataagctggaatacagacccggtaatacacagcgattatattaacaagcaatgtaataaaggagttttttatgttcatgtttctgccattcttgcttgcactgagcgtggcaatgggggccataaacagaaaggataaagtcagctacattctgtgggccgttttactcatcgtcactattttatcattcattcatcatatgaccaattcgctgactttgtcattttaaggagtgtgtatgaaaacgcatcatcatccaacaacatttgttcatctgattaatcaggtgggactccttgggatatgcgttgctctggttgtagccttttattatcaactcgtcaggcatgagctgccttgtccaatttgcttattacagcgggctggcctcatcatcgccggttttggctttttatttaacctctgctttggtctacgaggtatacattacgggatggtaattattggcagtatcctgaccggagttatggcatcccggcaaatatgtttgcatatcatgcccggtgacacaggatatggttctgcattttttggattacacttttatacctggactctgattacgtcaattctgattattattgctgttgcggtaattctggcaatcagtagcatgaatgttgcatttcgttcattgaatattaatccggacctgttcagtattgtcggttgggtatttctgttactgattactgccaaccttatttcaactgtactggaatgtggcggaggggaatgtgctgctaacccggtcacatataagctactgtcgaaacaggatattgcctttctgaaaacaggcctcctgacgaggacagttctccggttatgacgcacttttaaaatgactgattggtaaatatatagcaagcacctgtcttgtagaaattggaatggttatgggctaacacggaagttacagtaacattgaaatgttgcaataacaggaatcaaacttacaaccttcgcattacgaattagtagaatcacatttaactaactgtttcaaatacacatttccgcattcacattgctcaactcaatggcacatgatgttagaaatagaatgatgcttcaccatgtttgacacaaaaatggcacaccctataaagcatccacagcacatatttgggtggcacgcaccgtggaaatactgcattaccctaacacagggaattttctgtacagcgtcgacagccccgcatcataaataatcgctacctgctgtcgcggtactcctgccctaataaggcaccctgcctgcgcccattgctccggcgtcagttttggcctacggccaccaatgtagtggcactgtagtggcacactgggtactgaagcaatggccacaactggcgcttgatgctatcagccagataaccttccagatggataacaaacatagcagctatcctgtctgtatcggaattgtaaaaccagacgttgaccatcttcatcaaggttaaaggaacaaagagctctttaaagtaactctttgttccattacgatagtttaaatatgatgttctgaatgggccttcactacatgaacaggaaaggctcaggataaccacttctcagacattaaaagcaaatgagaaaaccaagggggcctaaacctgccgccagggaacaaacctttgcacagtctgcagtgctaccaccgtcccctatgcaccccagggcgaacgctggctgggcagcagacgacaacagcagaagagttgttatgaataaaactttacgtgatttaataagagaaaacatattattaccctcatagtaagcagtattaaataagccgggatatatctgatgttcaatcagtccctcatatagggttagcaccatagcgagtcgttttcacaaaaaacacagactgttgaaactttatttatcactttgacatttgcaatacatgacacatgattagcttcagccgccattatagggaaagctccatttccatactcatttactcacttctccctgcggaaaaagaaatgcagtatagccagcgtggtgcttttgctgaaaccaggcgcgagcaacacggcaatgatgatcggcgtcagaatgagttcggaatcggcattggcaaacaaggcgcacagtcgttaatacccaccagcagttccgccaagagtgcgacaatgtcgtaagagaggccttcagccaggcaaaacagcgctacggtgcgccccggcttgctgaggaagtgaacctggggcctgaggtacaatgtaaaaacgatagcgtccagcctgtgccatcagggtctgcggcgatctcagtccggaacaatttgaaaaccagaacctcgcttaaggctgtgtccacaatacgcggacaggatcaaaactgttagtgtggctggcttacaagaatgaagtgaagttgattgatataacaaacactcctgataatgttaactggcctgttcctccgggggagcgagccagccatgatttgaaaagcacatgaaatcactttcacatgaattaatttacattggaaataaaatataatagtgcttatcatttttatttaagttaaatattttataaatggtttttatttactcacctgatggtaatgaataacgtttaatatctatagtaaaggatgctgtaaccgtaaggatagtgtgccacaatttaacaggtaacatattatgaaacacgtcaagagcgtatttttagcaatggttttaatattaccatcttcactatatcctgctcttacaatagcggcagactctcaagatcataaaaaagaagaaacaattaagccaatgcctcaaaagtggtgtaatctttggcctgctggcatacccttccctgaagattggtttaaaatgtgtagaggttattgagtataaatttaatatactagccagtaaccatatcagttatgacagacaggccttcttcatatttgctataaataaggcctgagctttcctgacaaattataaactactggctggtttctccggccagacaggctttaaagtatcaacacggtttacctgtacccggtactttctccatgccagaagagaagctttttctttattggttgcttcgtccagatccactgcatcctgtaacggcgcgattttttcagacgctatttgcaggagtctgtttttcgttccttcagcttcacgaagtctggctgcggcctccgcagcttcatcattcatccagacctgagccttactatcccattttttgtatccaccacctggtgaaactgatgtgacgttttcaggtagcggaccaagatcggagatataaacctgattgccggttgttgtgtcgtaaaccgtctcgccgcggtgatcctcctgcagactccacgtttgggtttcagcgtcaaaaacagcaatatgactggagggaatatcaggaggggctatatcagtacaatttgccgggcgacgctgtccggggggacctgaccacatccggcccccattgcaggtaatgcaacagatgtaattttccggtcttctccggcgcttttattgtgctgaaaaattgccagtaacgcagcccgtgttgcattataaaccgcgtcggtgccgtcaataatcagcggaacgcgcatcgtcggggcgggaaccagccacggatgtttactgttacccgtttcaataacaaaggcggtgccgacgggctgttcccccaggtattcacggatgatattttgctgtacccgttcctgtaattgcgacccgaaatatgccgtaatagcagcatccacaccgccgtccataagaccaaaggtttccgcattaccgtctgcgtccacaataacgacgtgtccgtgtggaccgatatacatggtgtgctcgtgtcctccgatataaactgtatgcgcatggtcgccagcggcctgtgtccacgcaccacctcctagctgaaatgaagtgtgattggaatctccccagtatgaattgatataaccgccgaactggttagtatgattgcccgtggtattaacgccccttttcggagtcaaaccagttcttacgctcttttggagtcattttattcgggtcctgatgttcagcagcctgggaaacgggcgtttccatcagtacgcggatcacatccgtcaggagatacagcttgtttttttcattgcttcccagtgccaggggaacgcccgagaggcgactgacaaccgtctgtcgatgtaaccctgtaatagcggcaagctgactgatattgcatttgaggttcttcagttcgccgtccatttttacctctggggctgtttcttagcgcgccctcccccggaaaaacaaaatataatgaacaaaaaacatacaaaccatcatcttttaaaaataaattacattaaaacagagagttacaacatgatgatgatgcatgaaaaatcaaaaatgcgccaaatcccgcgccgctgccgccccgtggcaggccgccccgccgggagtacctttttaaaatgcgaacaattatcaacaactaccacttaatgattatttatttcattttgcgatattgattatcattttcaataacaacacacagagaacataaatgaaaaatatcatcactattatcgtagccattattatcgttttttatgcaggtatgtggtcgcagaaattcctgatggaagatgagtgccttgattcaggtggttcatacaatgaaaatggaatttgcaatattgcaggcagtcatcaggatgttcccctaagtaagcagaatgctttttaaattcgttacccacctctacagataaggaggcgaatggtcactaaaagtaaaatccattgcagaagaatttccggaaagttgttattccagcaccccgacaggttattcagacagatttcagctatatcaaaactgagtgagtacttatcagtttcatctggtgaaaaacctgttcttattcatctggttccatctgatgatatgtagtcacttttttacagcaatattacagggggagtttcaatgcctcctgtaattatttgactctctcaccgaatcatatactcgttcacacgtcattcctgcccggtagcgctcgtcagcgattccagcataatgtttagctgcttctgcaatatctccgagcatgttggcaagcattctggcgtcggcgttggttgttttgcttctgacggcagcggcaagatttgcggtgtgctttgcggcgtccaggcgggtggcaagtttttttgcttcggtacgcagctggctaacagtggcagacaggccagcagcagtggcagcagatttagcggcttgcgcttgtgcatctttcacagcctcatcacgggcaataacgcggccctgttcaataatacgggcggcggtctgggcgttgacttcctgagaggattcagcgctgtcgcgatctgcccattttttttgccagcccctgtcactccagacattaccggcgataaacgcaccagccatcagcaaaataaacaccagctgcaaccagtatcttttcagaagagcagataacagattcataccagcaccgattttgctttctcaaagcgctcccgccgatcaccgatgccgttctaccctccgttgatgatctgcgtaacacgtaccaggtcgccggaatatttcagacaccctttagtcacaaaaagccacgctgcggatcgggcagcatgacgttctagctcaagctgtcctggattcgccactagatccagtttcagtgcaacgccacatctggtgtaattctccagcccggtaatcctgatcttcgccgaacgtggtgcgaaagctttcttgccgttcatggcgttcgcgatccggactggtacgaatatgtgcctgataacaccccaacaacccatgaagaaaatgcagcaaggcttagtcaggcgggcaaatgtctgcgggatattgaggcagggagatttcagtgtgatgaagaaaaacagcaaccgacaggcgaactggcagatgaaccagcaacgcctgaagcagtggaacaggacacaactgaacatcatccggacccacagccgctggagaatgaaccacctgtaagccagacagaagcaggctaccagaaaatacgggcagaactgcacgaagcacgtaaaaacattccacccaaaaacccggttgatgttggtaaacaactggcagccgcgcgcggtgaatatgtcgaagacatcagcgacccgaacgatccgaggtgggttcataacaattacagcgcctcaaatcagggtgaaaaagaagaagtggtgccggagggaaaacaaccagcagcagagccggaggctgtcaccagaaacgcggacgggactttcgatgtatcagcgctattcctgcccccctcaaaccagaccgaaaaaacggaagccagaacagaaagagatggagaaacgccgaaagagagcaaccagcaggaaacggctggcgatacaggacaggaaattacaacggacggtggatcaggtacaacttcatagcgcaaaaccacacgccagtggcgcttattgaaaaactaaaaggaacggactcattcactgtgtccgcatggattgatcgctatgaggttttattacagcgccggaatctgtcggttaatacctacaagattcgcagtaatcaattagcgaccgtacgcgaaaaaatgggagaaataatactggcagaagtaacaacccggcacattgccaagtttcttgagtcgtggataaccgagggaaaaaacactatggcgggagcaatgagatcagttctatctgacatgttcagagaggctattgtcgaagggcatattgtgaaaaacccggtggaagcaacccggataccagagattaaggtggccagggaacgcctgcaactggaaacgtataacgccacacgagcggcagcagagcatatgcctgcatggttccctctcgcgatggatttagcgctcgttactggtcaacgtagggaggatatcgtaaatatgaaatttagtgatgtttttgacaaccgcttatacgtcactcagattaaaaccggaatgaaaatagccattcccctctccctgacacttcgggcgacggggttacgtctgggaacggtaatcgatcgctgccgacttgtaagccgcactgatttcatgatcagtgccggaatcaggaaaaatagcccgaccgggaatattcatccggatggattgacaaagacatttgtaaaagcaagaaaagcctccggtgttaacttcagcaataatccaccgacatttcacgagatccgaagtctggccgggcggctgtacaaaaacgagcacggcgaggtgttcgcccaaaaactcctgggccacacatcagagaacaccacgaaactctatctcgatgaacgcgataataaagcttacgtgatgctctgattttgttgtaaaagaaatgttaaactggatttggatgtgatataaccaaaaagaccggaatacagaaattcgaggaaatttcgaggaatttcgaggggaaacacataacccattgatttataatctaaataaaaagagaccgaatacgattcctgtattcggtccagggaaatggctcttgggagagagccgtgcgctaaaagttggcattaatgcaggctaaatcgccttgccctttaagaatagatgacgacgccaggttttccagtttgcgacgaaggtgattgaaaaaacctggcgttttgtctgttatcagagataaaaaaaccgtaagccttttcgtgaaggtttacggttttttattaaaaatcagtcagctattggatggatcacaaagcttttgcgcacgttcgataaacggcgccagactcattttctcaccgggcttcgccgggttatcgatttgaatgacggcaataggctgagcgcgcgttttaccctccgctacttgctgttcggcaatggcattcaagggatactgcaccagcgtactggggttgatcacatagagcgcctggccaggccgacaggtcaacatgacctcttcccgattaaacgcccacttgtcttttcctacttcaaaacgacttacggtaatcacctgcggcgccgccaacgctacgcccgaagtggccagcagaagcgccggaaggagtatttttttcattcgttatgccagtccatcaaaaaggttcgagggttgcaaacaggctgacgatcgccagaactatgcctccaactccccattcaatttgcgtcatcctgacaaaccataggtcagtccggggattttcctgtcgcatacgtggtacgagaacataccgattcgtcagcgcaattgctaccataagcacgaccagcgcacattttaacaaaagcaactgtccataggtggtctgccagatagcggtaaatcccgtgataaatagcgtgttgccaatgcctgtgagcaatacgcccgccacaaaaaagtgaccataacgagaaaaacgcatcatggcgctaatagcatgttgacgccagcgtccctgagccatgcgcatacaataaaccactggcaacagcccgccaaaccaggctgcggcacagagtaaatgcagagcatggttaatctgctgtaatgttcccgctacaccgtcgcgcatcgtcgcatgtccaacgcctgccagcaggataaactgagcaacggttagaataagaagccgtcgttgcatttttaccggcgcaatgactaccaccgccagcgtgaccagcgcgaggataatttgccatatccagaccgcgccaaagcgggtttgcagtaccgcgccccacaccgagacgaaaaaaacatcgggccagccgccgcccatcagtccgccctgaaccgccagcatgaaagccgcgctgataacgctccaggcggcggcatgttgttgcagatgtaaaaatcgacgcgtcattaaacgacgaattgatgcgggtgccagccaggcaccgtaaagcgcgcagccgtagaccagcatcacactagcaaaatgaataaatcggagagttatccagacgaatgtcagcatcatttatttcacgctgaaggtgtatttcccttttgttttatgtccatccaccgacacaacgtgccagtctaccgtgtaagcgccagattttaacggctgctcaagcgggataatcaactgcgttttatcctgttcatttcgctttgccgggcgcgttttgatgagctcttgctgagggccagtaatggttgcgccgctgaaccctggctcaatcccttcagaaaagttcagggtcagcgcctgtggcgaggccgtaacggcagcattcgccgctggatactgatgcgtcaggtgcgcatgtgcccaggccgctggcgtcgcaaatgtcgatgccagcagcagtaaagctaaacgtcgcgatggtgcagaagaagccatattcactattcctttttgttatacctacgttacaaagaataaccttcaacaatcaatgagtcgaggatcatcatttccatcttgccattaccgcggactcttagtaccttctggcggcaacaaaaaaggagacacgtatgaaaacaaatctggctcagcttgaacaagcggaaatggataaagtcaatgtggacctggcggcagccggggtggcatttaaagagcgctacaatatgccagttgtcgcggaggcggtcgaacgtgagcagccagagcatctacgcgcctggtttcgcgagcggctgattgcccatcgtctggcttccgtatcactatcccgactcccttacgaacccaaagttaaataaaaattatataacgttacacttccttacatgcagacgactacattataaggcgattcttaacctatgctttttagaatggctgtagagactatgaaaaggaagtcattatgtcctcctggaaaattgctgctgcgcagtatgcgcccctgaacgcctcgccggcggagcatgtcgcccatcatctggaatatattgagcttgcggctcgtcaacagtgcgaactgctggtctttccgtcactgtcgctattaggctgcgacgaaaggaataaatcgttgcccgccccgcctgacgaggcgcttttacagccgctcactcatgcggccgatacccaccatatgactatcattgtgggtatgcctgttgagcataactgccgcttcgtaaaaggcatcgctatttttgccccatggctaacgtcgccgctcatgtttcacaaaagtcatggcgcctgtattgccaggcagcgaagcgctatcaacgtggtggatgagcagccagaaggtggtgatatagatccctcatttacgttattcacaaccagtcaatgtcttaacgaacctgaactccatgcttctacctcacgcttacaacgtttttcgcataaatatgcgctggccgtactgatggccaatgcctgtggaagtagcgctctgtggaatgaaagcgggcaacttattgttcgtgccgattgcggttcgctattactgacgggcctgcgcacaacggagggttggcaaggcgatatcattccattacgctaaggtctttcggtgaggaatgaatcatgttgcggattatagacacggaaacctgcgggctgcagggcgggatcgtagagatagcctctgttgatgtcattgatggcaacattgtcaatcccatgagtcacctgatacgccccgatcgccctattacgccgcaggcgatggcgatacaccgtattaccgaagccatggtcgccgataagccgtggattgaagatgtcataccgctttattacggtagtgagtggtatgtcgctcacaatgccagtttcgacagacgcgtattacctgaattgccgggtgagtggatctgtaccatgaagttgtcgcgacgcctgtggccgggaataaaatacagcaatatggcgctctataaatcgcgcaaactaagcgtacaaacgccgccggggctgcaccatcaccgggcgctttatgattgctatatcaccgccgccttgctgattgatattatgcgaaccaccggctggaccgcggaagagatggtcaatattacgggccgtcctgcgctgttaaccactttcccgttcggtaaataccgcggtaaggcggtatctgaagtcgcaaaacgcgatccgggctatttacgctggctttttaataaccttgataatatgagcccggagcttcgcctgacgcttaaacactacctggaagatgttcaggctggcgagcaacgcagcaatggaacaccacaataacccgcgacgctcacaagccgttgcgggcgcgcgtctatgcgctatgtaaggttccctgcgccaggccgattaaaaaggcgaactccagcgcgacgccttcgtaggatttaaaccgccccgacttaccaccgtgcccggagtccatatccgtacataacagcagcagacgttggtccgtttttagctcgcgtaattttgccacccacttcgccggttcccagtattgcacctgggagtcgtgcaatcctgtcgtcaccagcaggtgcggatagtcctgcgctttgacattgtcataaggactatagcttttcatatagtcataatactcaatatcctgcgggttcccccactcttcaaactctcctgtcgttagtgggatcgactcatccagcatcgtggttaatacatcaacaaagggtacctgggcaataacgccgtggaaaagctcggggcgttcgttgatagcgacgcccattagcattccgcccgcgctcccgcccatcccataacacagcgacggcgaaccgtaacccagttttaataaggcatcgcaggcatcaagatagtcattaaaagtattccgctttttgaggaacttgccatcttcataccactgctgccccagctcaccgccgccgcgaacgtgtacgattgcgtaaacaaagccacgatccagcaagctcagtcggctgctgctgaagtcggcgtcaatactggaaccgtaagatccgtaaccgtaaaccagaagcggattttgccctttacgaaaatacttctgatgataaaccagcgataccggcacttcgacgccgtcgcgtgcggtgatccacaggtgttcgctctgataacagccagaatcaaacccaggcacttccgtctgtttaagtacccgtcgttctccggtatccatatccagttcaaacaaggtatctggcgtcgtcattgaagaatagccgtaacgcagccgggaggtctcaggttcgggattataggcaagccacgtcacgtaagccggatcgtcaaaggcgatgcctatcacttcacgggttttacggttaatttgccgcaggctggtaagcccccgttgacgctcttcgaccactaaccagtcggtaaacagggtaaacccttccagcataatatgctcgcgcggagggatcagctcttcccaggcgttttcattgcgcacgcgggtacggtacaacccaaagtttttaccgttccggttagaacgcaggtaaaacttatgttgatagtgatcgagactatattcatggtctttgcggcgcggtaaaaatgaaaacggctcggcatcggccagttccgcgtcaagtaatagcacttcgctagtggtggcgctggcaaggtgaatcaccacataatgctgcgaagtggttttatgcaggctgacataaaaggtatcgtctttctcctcatataccagttcatcttgcgatgacggagtgccaatcgtgtgccgccaaacctgatagggcagcagcgtcttcttatgcttacgcacatagtaaagggtcagggaatcattggcccagacaaattcaggcgcaacgttatccagcagttccggataccagttaccgctttcgaggttacgaaaacgcaacccatactgacgacgggataaataatcttctgccagcgccatgatggtattatccggcgtaatggcaagtccaccgagcgtataaaattcgctgtgcgcggcccgctggttcgcatcgagcaaggtttcccacacatcccactcttcgcttaacgccgattgtcgttgatagatggcatattcgcagccgggttcatagatataacggtagcgatagccatttttcacatacggagcggaaacttctctgggcgggatgcgatcgataatttcttttagaatgcggtcctgtaacgcctgctgagaggtcatgaccttccggccatactcattttcctgatgcaggtaatcaaggacttccggctgcgagcgagtgtcatctcgcagccagtaataattatcaatgcgcgtatcgccatgtacggtcatggcatagggaattcgattggcttttggcaacatgtcgttttttcttttgcgttaatatttgttatatatcacgcggcaaacacagcggcgtagcatggtagtcccggtcgctcacctcggtaagcgcctgagatgtcactgcttcgccgctatcttgcaacatgaatgacgtaaactatccatcctataagggtggcaaaagacacgcatgatgcaagcgaaacatgttacttaatggcaggttatcagcctggtagcgcctgtttttgctgctgcaagtcctgctcgataccgtcccgaacctcctgaggaatttttagcgcgtctcctaacgcattcagatagctacgttccataaagtggtcaatatcaatggcggcgcagctcaggaagtagatttccagggcttcttcttcattgcgaatgccctgtgccagacgttgtggatcaagcggctgctcaatagctttttcgataaacacacgcccttgctcttcaacacctgattctcgcagttggtgctcaatcgccgcgcgttctttggcatcaatatgcccatcgctttttgcagcaaaaaccagcgccaggatcagtcgctcagtgcgaacatccagcggcgtactttggctgccgaattgcggctccccctgatgcgcggcgcgtactttatctttgtacttattccacaatacggaacccgccaccgcgccgccgcccaccagcaaagcgccagtaccgtatttggttaataatttgcgcgaagacttattggcgaccaacagtccagccagaccgcccagcgcgccgggaaccagcagtttatttaacccctgttcaccggaaggcgatgcggaagcgcctttttgcccaagaagtgattgtaattggttcaaccagttagccatagtacccctcaaatacagaccaataatggtcaagcgtacctgaggggatgtcaggaattgtctgttccggcaaaagaagcgcaaattacgctgctagcggggcttatattccgccttgccggctttgcaatcaacgatgacctgataatgaatatcggcgcttttaccgcgaacagttagcggaactgtccatttatcattttgacccacaacgtcctgcacattaacccacgcgaccgggtcagcctgcccgacctttttttggtcgtcggcccaccgcacgatacgattttgctggtagtcgcgcttcacgcttgccgcaatcccggcggcatccagcccttcgcactgcggaaacttaaccgatttactctcggtggatgccgcaaatgccgatacgctggcggataaaaacagcaggctcaacaacgctcctcttttattcatacttttctccttagcacaatgattcaggaaaagcatggtacaaaacgccgggagcgcaagtgtgggttcaggcggcttgctttttcgttttactcgcggcgtccttttcaaccgcctgcggagaaggcaacttaccggttttgaggatagtgcttaacacctctttatgttccgccagccacagcgacaacgcttcgcgctgcccatcttccagcacgactggcgactgctcaagccaggtatcaagaagatcggcagtatcgagcattttgtcccaggcgtcggcttcctttttactggtaaatgacatcttctcctcaccctcgcgaatgactacgtatttaacttcaaccgccattttgcagccccttatttacctgtgtttatatacagtatattgcaaggcagcaagaaaagcaatttattcgaaaagacatacgcaaacgttttcgtatatactgcgcgcaggtaaataaggggacagaaatatgacgctattaggcactgcgctgcgtccggcagcaacgcgagtgatgttattaggggcaggagaattaggaaaagaggtggcgattgaatgccaacgcctggggatcgaggttatcgccgtcgatcgctatcctgatgctcccgccatgcatgtggctcaccgttcacacgtcattaatatgctggacggcgaggcgctacgtcatgtgattacagaggaaaaaccgcattatatcgtgccggaaatagaagcgatcgccaccgatacgctgcgcgagctggagggcgaagggctgaatgtcgtgccttgcgcccgtgcaacgcagctcacgatgaaccgcgaagggatccgtcgcctggccgcagaagaattaggactgccgacatcgacgtatcgctttgccgacagtgaggccagttttcatgatgcggtagccgcagtgggttttccttgcatcgtcaaaccggtcatgagctcttccggcaaaggccagagctttatccgctcggccgaacagctcgcgcaggcatgggagtatgctcaacagggcggacgcgctggcgcgggtcgcgtgattgtggaaggcgtggttaaatttgattttgaaattacgctgctcaccgttagcgccgtcgatggcgtgcatttctgcgcgccggtcggtcatcgtcagcaagatggtgactatcgcgaatcctggcagccacagcagatgagcgaactggcgctgaagcgggcgcaagagattgctcgtcatgtggtactggcgttaggcggtcatggcctgttcggcgttgaactcttcgtctgtggcgatgaagtcattttcagcgaagtctcccctcgcccgcacgataccggaatggtcacgttgatttctcaggatctctctgagtttgcgctgcatgtgcgcgcctttctgggaatgcccgtaggcgctattcgccagtatggtcccgctgcctcggccgtgattctgccgcagcttaccagtcaaaatgtgacgtttgataatgtacacgcggcggtaggagccggagtgcaggtacggctgtttggtaagcctgagatcgacggcacccgtcgtcttggtgtagcgttagcgacaggtgaaaacgttgaagaagcggtgataagagcgaaaaaggccgtcagccgcgtgacggtaaaaggctaatgcgccatcgcctgatggcgacgttagcgcatttttatcagacctgcctgatcgccactcgtaagcccgataagcaagcgccatcgggcatttaacggcttactgcttcgcgccttctaccgcttcgcgcgccagtttggtgatgcgatcgtaatcacccgcttccagcgcgtcggccggcaccagccaggaaccgccgatgcacaacacgcttttcagcgccagatagtcacgatagtttgccggagagatgccgccagttgggcagaaacgtacctgagagaacggaccggcaatcgcctgcaacgctttagtgccgccattcgcttccgccgggaagaatttgaactctttcagaccatagtccatgcccaacatcagttcagaaacggtgctaataccgggaatcaatgggatagtgcctgccgtcgcggctttcagcagtggctcagtcagtcccgggctaatcgcaaattgcgcgcccgcttccgtcacctccgccaactgctgcggattgagaacggttccggcgccgacaatcgcttccggcacttctttagcgatagcgcgaatagcatccatcgcgcaggccgtacgtaaagtcacttccagaacgcgaacgcccccggccaccagcgctttagccatcggcaccgcgtgctccagtttattgactacaatgaccgggacaaccgggccggtggtcaggattgcttctgcacttgttttccagtttttcatcggaattcttctctcgcctgattactagtgtgtcatcttaaaaagtgatacaggttgcgccctgctccgcacccgacagcttttcgcgcagcgcgccaaacaactcacgccccgttccgacgcgcgacgcgctcaggtccggaatatgaggctgacgagcggcaagttccgcctcgtcgaccagcagagttaactcacctgtctgcccattcacgcgaatgatgtcgccatcgcgcacttttgccagtaagccgccatcgtaggcttccggcgttacgtggatagctgaaggcactttacccgaagcgcctgaaagtcgtccatcagtaactaacgcgattttgaaacggcggtccaataatacaccaagtggcggcatgagtttatgtaattctggcattccattcgcttttggtccctgatgacgcacgacaacgacacaatcccggtcaagcaggcccgcgtcaaacgcaggcagcacatcatgctgactttcaaataccatggcaggcgcttcaatgatctggttttcaaccggtaccgcagacgtcttcattactgcgcgccccagattaccgcttagcaccttagtaccgccgtgaggagagaacggcttatcaaaagaggcaatgacatcgttatccagtgacctttccgcgccttcacgccagtccagctcgccgttgttgagccagggctccagcgtatagcgtttcaggccgaagcctgcgacagtattaacgtcttcgtgcagcaatccggcattgagcagctcacgcatcaataccggtacgccgcccgccgcctggaagtggttaatgtccgccggaccgttcggatacagacgcgccatcaacggaaccacttccgacaaatccgagaagtcatcccagttgatcagaatgcccgccgcgcgcgccattgcaaccagatgcatggtgtggttggtggagccgccggtagccagcagcgcgacaatgccgttcaccacgactttttcgtcgatcattttaccgagcggcatccacgtattgccgttgccggtaagacgtgttacctgacgtgcggcagcggcagtcaatgcctcgcgcagcggcgcatccggatgcacaaacgaagaacccggcaactgcattcccataaactccaccaccatctggttggtgttggcggtgccgtaaaatgtacaggtgcccggcgcatggtaagaggcggcttccgactccagcagcgccattctgtctacttttccttccgcatatagctgacgaatacggactttttctttattcggcaggccgctcgccatcgggcctgacggaacaaaaatcgcgggtaaatgaccaaaagagagcgcggccatcgccagccccggaacgattttgtcgcatacgccgaggaataacgcgccgtcaaacatattgtgagagaggcctactgctgccgacatcgctatcacttcgcggctgagtaatgacaactccatgccatcctgcccttgcgtaacgccatcgcacattgccggtacgccgcctgcgacctgacctaccgcattcacggaatgcagggcctgacgaataatctgcggataatgttcatacggttgatgcgcagagagcatgtcattgtaggaggtaataatggcgatattattgcgcaacatacttttcagcgaggctttgtcctctggctgacaggcagcgaagccatgcgccaggttgccgcaggccagttgagatcggtggaccgtggcggttttcgcctgctcaatgcgggcaagataggcttctcgggtctgctgcgagcgttcgacaatacgctgtgttacgcgtaacaaattaggattcatagaggctcctgaaatttatctgtccggctaccgggtttaccatgcgtttcatcaatgtggaaagacagtgaaatacatgatgtccggtgataatggggcaaaatcgtttcaggcagtgtaataaaaaaagcctcgcaggtgaatccacacgaggcttaaaagtgcaaaaatgattctacaatctgtgttagatcatgttaccggtaaaataccacctaagagtgagtggcaaatttactcaaactcattccacgaacgaccgtcacgggtaatcatcgccacggacgctaccggtccccaggtgcccgcctgatacggcttcggcgcgtcgttgtccatcgcccatgcttcggtaatggagtccacccacttccaggcttcttccacttcgtcacggcggacaaacagcgcctgaatgccacgcatcgtttccagcagcaggcgttcataggcatccgccaggtgcgtctgattaaaggtctcggagtagctcagatcaagcttcgtgatctgcagattatgcttatgatccagccccggtactttgttaagcacctgaatatctacgccttcatccggctgcaggcgaatcgtcaatttgttctgcggcaggtcttgccaggactctttaaagaggttcagttcaggcgtcttgaaataaaccacgacttcagagcacttggttggcagacgcttgccggtgcgcagatagaatggcacgcccgcccaacgccagttatcgatgtcgacgcggatcgcgacgaatgtttcggtgttgctgcttttattcgcgccctcttcttccagatagcccggcaccttttgcccctgcgcaaagcccgcggtgtattgaccacgaaccgttttttcacgcacgttggagcgatcaatccggcgcagcgatttcaacactttgactttttcatcgcgaatactgtcggcgctcaggtcagacggcggtgacatggcaatcatgcagagaatttgcagcaagtggttctggatcatatcgcgcatctgaccggcctggtcaaagtatccccagcgcccttcaatccccacctcttccgctacggtaatctcaacgtgatcgatagtgcggttatcccagttattaacgaataacgagttggcaaaacgcagcgccagcaggttgagaaccgtttctttacccagatagtggtcgatacgatatacctggcactcttcaaagtattcgccgacccgatcgttaatctcacgcgaggtcgccagcgaagtacccaacggtttttccatcacgacgcgcgccggtttggcgttgagtttagcctctcctaaccctttgcaaatagcgccaaaggtgctgggcggcatcgcaaaatagttaatggtggtgcggtttttttgatccagcatatcgcccaggcgactaaacgcaggcgtatcgttaacgtcaagattacaaaaatccagacggccgctcagcgtatcccacaagccttcatcaattttttccttcatgaaggtttccagcgcttcacgcacaacgtgggtataggcttctttatcccagtccgcgcgccccaccccaatgatacgggtatccggatggatctggccggctttctcaagctgatacagggaaggcagcaatttccggcgcgccaggtcgcctttcgcgccgaaaatgaccaggtcacatgcctgggctgtttgcgttaccgccatgtcattctccttagttaatctcctggtactttagccaggatatcgttgtaattttattacacagcactgtactgcttttacgagattacggaaaccgtaaacgccttttcatggatgaaccggcgtttgattggcaatataatcggcaaaacgcctaataaaattgtcgcttttccacacaagctggaacttaaaatccgacgtcggtcatgtaatgaaaaaaaacgacaccttttttagccattttgcccccttcggcagtcgccaggagtaatatctaacaaaacgcgctcggtttcgcgcatcattgaaatcgctaatacccatgagccttgctaatcatgaatatgctggaaaaagtccagtctcaactggaacatttaagcaaatctgaacgaaaagtcgccgatgttattctggccgccccaggcagatcgattcacttaagcattgccatgctggcccaggaagctaacgttagcgagccaacggtgaaccgtttctgtcgcagcatgaatacccgcggctttcctgattttaaactgcatctggcgcaaagtctggcaaatggcaccccctatgttaatcgcaatgtggatgaagatgacagcgtcgaggcctatacagggaaaatcttcgagtccgctatggccagtctcgaccatgttcgccagtcgctggataaatcggccgtcaaccgcgccgtcgatttactgacccaggcaaaaaaaatcgccttttttggtcttggttcctccgccgcggtcgcgcatgacgccatgaataagttttttcgcttcaatgtaccggtgatttactccgacgatatcgtgctgcaacggatgagctgtatgaattgtagcgatgatgacgtcgtcgtgctcatttcgcatactggcagaaccaagagcctggtggaactggcgcagttggcgcgggaaaacgatgcgatggtgatcgccctgacctccgctggaacgccgctggcgcgcgaagccacgctggccattaccctcgacgtaccggaagatacagacatttatatgcccatggtctctcgacttgctcagctgaccgtgatagatgtgctggcaacgggatttactttgcgtcgcggggcaaaattcagagataacttgaagcgtgtcaaggaagcgctcaaggaatcgcgttttgataaagaattactcatcaagagtgatgaccgctaaaagcaataacaatgttctacccttttcgtcatccggggacgttcattttataccgttaaggtttcagaacgaccggatcaatgttcacgcaacaccaagttgttttagtcaacggagtattacatgtccagaaggcttcgcagaaccaaaatcgttaccacgttaggcccggcaactgaccgcgataacaaccttgagaaggttatcgccgcgggcgcaaacgtagtacgtatgaacttctctcacggctcgccggaagatcataaaatgcgtgctgataaagtccgtgagattgccgccaaactggggcgtcatgtggctattttaggcgacctgcaagggccaaaaattcgcgtttccacttttaaagaaggcaaagtgttcctcaacatcggggacaaatttctgttagacgctaacctgggtaaaggcgaaggcgacaaagaaaaagtcggcattgattacaaagggttgccggcagacgtcgttcctggcgatatcctgctgcttgacgatggtcgagtgcagttgaaagtgcttgaagtccagggcatgaaagtctttaccgaggtcaccgtcggcggcccgctgtctaacaataaaggcattaacaagctcggcggcgggctttctgctgaagcgctgaccgaaaaagacaaagccgatattcaaaccgctgcgctgataggtgttgactatctggccgtctccttcccgcgctgcggcgaagatctgaactatgcacgccgcctggcgcgcgacgccggctgcgacgcgaaaattgtggctaaggtcgaacgcgccgaagcggtatgcgaccaaaacgccatggacgatatcattctggcctctgacgttgtgatggtcgcacgtggcgatctgggcgttgaaatcggcgatccggagctggttggtatccagaaagcgctgattcgccgtgcgcgtcagctaaaccgcgcagtcatcaccgcaacgcaaatgatggagtcgatgatcaccaacccgatgccgacccgtgcggaagtgatggacgtggcgaacgccgtcctggatggcacggatgcggttatgctgtctgccgaaaccgcagccggtcagtatccttctgaaaccgttgccgcaatggcgcgcgtctgcctgggcgcagaaaaaatccccagcatcaatgtgtctaaacaccgtctcgacgtgcagttcgacaacgttgaagaagccattgccatgtctgcgatgtatgcggcaaaccatctgaaaggcgttaccgcgatcatcaccatgacggaatccggtcgtaccgcgctaatgacttcccgtatcagctccggcctgccgattttcgccatgtcgcgccatgaacgcacgctgaacctgaccgcgctctatcgcggagtaacgccggtgcattttgatagcgcggctgatggcgttgtcgcggcacatgaagctgttaatctgctgcgcgataaagggtatctggtttccggcgacctggttatcgtgacccagggcgatgtcatgagcaccgtcggttcaaccaataccacgcgtattttgaccgttgagtaaaactcccccacgcctgttcatcaggtagtacagggtttgtcagcataaagcctctcttacgagaggctttatttatttgatgggataaagatctttacgcttatacggctgaatctcgcctggcttgcgggttttgagcagcttcaggatccaggtgtactgttccggatgcgggccgacaaaaatttcgacctcttcgttcatccgtctggcgatagtgtggtcgtcagccgtgagcagatcgtccattggcgggcgaatctggatagtcaggcgatgcgttttaccattatacaccgggaaaagcggtatcacgcgtgcgcggcacactttcatcagccgaccaattgcaggcagcgtcgctttgtatgtcgcaaagaaatcaacgaattcactatgctccgggccgtgatcctggtccggcaggtagtaaccccagtagccctgacgaacagactgaataaagggtttaatcccgtcattacgcgcatgcaaacgtccgccgaaacgccgacgcactgtgttccagatatagtcaaaaaccggattaccctgattatgaaacatcgccgccattttttgcccctgagaggccatcagcatggctggaatgtcgacgccccagccatgcggtacgagaaaaatgactttttcgtcgttacgacgcatctcctcgataatctccagaccttcccagtcaacacgctgttgaatttttttcggaccgcgcatcgccaactcagccatcatcgccattgcctgtggcgcggtggcgaacatctcatcgacaatcgcttcgcgctcagcttcgctacgctgcggaaagcacaacgacagattaattagcgcccggcgacgagaactcttccccagccgtccggcaaaacgccccagcgtcgccagcaaagggtcgcggaatgatgccggtgttaatgcgatccccgccattgccgccgcgcccaaccaggcgccccaatactgtggatagcgaaaggatttttcgaattcagggatatactcactattattttttttggtttccatgcttttccagggtctgctgacgcgaaaaggaattgtgaatagtgtagcgacgtctgcgtctcacacaaaacaaaaaagccggcacacatcgcgtaccggctctgtcagcgcatttgttaatcgaagcgcagttgcggcagaacctctttcacctgtgccaggtattcacgacgatctgaccccgtcagaccttccgtgcgcggcaattttgctgtcagagggttaacggcttgctggttgatccatacctcataatgcagatgcggccctgtggaacgcccggtgttaccagaaagcgcaatacgatcgccacgtttcactttttgccccggtttcaccagcagcttacgcaagtgcatgtaacgtgtggtgtaggtgcgtccatgacgaatcgcaatgtagtaaccggcagcgccgctacgtttagcgaccacgacctcgccatcccccaccgacagcaccggcgtaccctgcggcatcgcaaagtcaacgccacgatgcggcgcaacgcgtccggtaaccgggttcagacgacgcggattgaagttggaggagatgcggaactgtttagcggtcgggaagcgtaaaaagcctttcgccagaccaaccccattacggtcatagaatttaccgtcagcggcgcgaatggcgtagtaatctttaccatcggaacgcatccgcacgcccaacaactgactctgttcacgcttgccatccagcatctcgcgcgacatcagaaccgaaaattcatcgccctttttcagcttgcgaaaatccatctgccactgcatggcttttatcactgcgctgatttcgctgctggttaaaccggcctctttcgcgctggcgacaaagctaccccctaccgtacctttcagcagactgttgacccagtccccctgctgcatttcactgctcattttaaaaccgttggcagtgcgatcgtaggtacgcgtttcacggcgggagacttcccatgtcagacgctgtaaatcgccatcagcggtcagtgtccaggaaagctgttggccaattttcagattgcgcagctccttatcagaagcggcaagtcggctaatatcgctcatatcgatgccgtactgattcagaatgctgcttaacgtatcgcctgtggagacgacgtattcatggacgccgacttcgcctgcggttttatcgtccagctcatcctgaggaatagcttcatcttcctgcgcggcctgatcgatgggttcgctggcctccggtaagagggaacgaatctcgcttttctccagttcaatagttttaacgattggcgcggattctgggtggtaaacatagggccgccatacggcgacggccagtgtcagaacggtaagtgaccccagcataacgcggtggggtcggggcagattattaaatgccagggcgacagagcgggctatctgttgcacgtattcacttcctcgttaatctcctttcaggcagctcgcatactggttggctaattggcttaaaaacgctgaatagcttgttttacccagtttaatgttcgtcccgagggggtccagtgttcccattcgaacggatgtccctctcgccacggcttccacgaccgctggcctgaattgtggctcagcaaaaacgcaggttgctttttgctcaaccaactgtgttcttatttcatgtaaacgctgcgcgccaggttgtatctcagggttcacggtaaagtgaccgagcggggtgagtccgtagtgtttttcgtagtaaccgtaggcgtcatgaaaaacgaaataccctttccccttgagcggcgcgagctcgttaccgacctgtttatcggttgcggctaattgtgcctcaaaatccttcaggttggcgtcgagtttggctcgactttgcggcataagttccactaatttttcatggattgcaaccgctgtagcccgcgctatctctggggagagccaaagatgcatgttatattcgccgtgatggtgatgtacgtcacctttttcctcatcggcgcccgtatgcgcatgttcatcctcatcatcatccgcgcccttcatgagtaacggttttacatcggcaagttgcgcaatggtaacctgcttattatcagggatattcctgaccgacttctccataaaggcttccatttccgggccaacccagacgactaagtccgcgccctgtaagcgttttacgtctgatggacgcaatgaataatcatgctcggaagccccatccggaagtaatacttgcgtatccgtaacgccatcagcaatggcggaagcgatgaacccaagcggtttaagcgaagcgacaacggcggcgtcggcagcctgggttgcactcccccaaagcgcggcggataatgctgcgaaaagaagcgtatttttctgtaacataatgcgactaatcatcgtaatgaatgtgtgaaatgtgatattataacattctatcacttctgcaagcctaaaattaacatgacaagtttagtttcactggaaaacgtctcggtctcatttggtcaacgccgcgtcctctctgacgtgtcgcttgaattgagccccggaaaaattttaacgcttctcggccctaacggcgcggggaagtcaacgcttgtacgcgtggttttaggactggtagcccctgatgaaggggtgatcaagcacaacgggcaactccgtatcggctatgtcccgcaaaagctctatctcgataccacgcttccgctgacggtaaaccgatttttacgtttacgtcccggcacgcaaaaaacggatattctcccggcgcttaaacgcgttcaggccggacatttgattgacgcgcccatgcaaaaactctccggcggtgagacacagcgcgtactgctggcgcgtgctctgcttaacaggcctcagttgctggtacttgatgagccgacgcaaggcgtggatgtcaacggccaggtcgcgttatacgaccttatcgatcagctgcgtcgcgaactcgattgcgccgtgctgatggtgtcacatgacctacatctggtcatggcaaagacggatgaagtgttatgcctgaaccatcatatttgctgttccggcgcgccggaagtggtgtctatgcatccggaatttatctctatgtttggcccgcgaggcgcggagcaattagggatttatcgccatcatcataatcatcgccacgatttacagggtcgtattgtactgcgccggggaaatggtcactcatgattgaattattactgcccggctggctggccgggatgatgctggcctgcgccgctggtcctttgggctcatttgtggtctggcgtcggatgtcctattttggcgatacgctggctcacgcgtcgcttctgggcgtggcgtttggcctgttgctggacgttaaccccttttatgcggtaatcgccgttacgctgctgctggccgccggtctggtatggctggagaaacgccctcacctcgcgattgataccttactgggcattatggcgcacagcgccttatctttaggactggtcgtggtcagcctgatgtccaacgtccgcgttgatttaatggcttatctgtttggcgatttgctggccgtcacgccggaagatcttatctcgatcgctattggggtcgttattgtgctggccattctcttctggcagtggcgcaacttgctgtcaatgactatcagtccggatcttgcctttgtcgatggcgtgaagttacagcgcgtgaagctgctattgatgctggtaacggcgttaactattggcgtggcgatgaagtttgtcggagcgctgatcattacgtcgctgctgattatccccgccgcaaccgcgcgtcgctttgcccgtacgccggagcagatggcgggcgtcgccgttggtgtaggtatgatagcggttacaggtggactgaccttctcagccttttatgataccccggcagggccatccgtagtgctgtgtgccgcgctgctgtttatcttcagtatgatgaaaaagcaggcaagctaagcgtgtgttgcccggtggcgctgcgcttaccgggcctacaaaatcgcccaggtctgatgagcgcagcgacttcaggcgctaaggcatctctggcggcgtgatcccgaaatggttccaggcgcgcaccgttgccatacgcccacgcggcgtacgctgcaaaaagccttgctgaatcagatacggctccagcacatcctcaatggtttcacgctcttcgccaatcgccgccgccaggttatccagtcccaccggaccaccgaagaatttatcaataaccgccagcagcagcttgcgatccatatagtcaaacccttccgcatcgacgttcagcatatccagcgcctgcgcggcaatttccgctgaaatagccccgtcatgcttcacctcagcaaaatcacgcacacgtctgagcagacggttggctatacgcggcgtaccgcgcgcccgacgcgccacttccagcgcgccgtcatcgctcatctcaagccccatgtgccttgcgctgcgcccaacgatgtgctgcagatcgggcacctggtagaactccaggcgctgcacaataccaaaacggtcacgtagcggggacgttaacgacccggcgcgcgtcgtcgcgccaatgagcgtaaacggcggcagatcgatcttaattgaacgtgcggcaggcccttcgccaatcataatatccaactggtaatcttccatcgccggatagagtacctcttccaccaccggtgaaagccggtgaatctcatcaataaacagcacatcatgcggttcaagattggtgagcatagccgccagatcgcctgctttttccagcaccgggccggacgtggttcggagattgacgcccatttcattggcaacgatattcgccagagtcgttttacctaaccctggcgggccgaaaatcagcaagtgatctagtgcgtcgccacgccgttttgccgcctgaataaagatctccatctgggagcgcacctgcggttggccgacatattccgccaataacttcgggcgaatggcgcgatcggcgacgtcttctgcgatcgtggcgcctgctgaaatcaggcgatctgcttctatcatcctttacctcataacgcggcgcgtaacgcgtcgcgaatcagtgtttcactgcttgcatccggacgggcgatcttgcttaccatccgactggcttcttgcggtttataacccagcgccaccagcgcagcaactgcttcttgttctgcatcttccgaggttgggctggccggcgacgtcaataccagatcgaccgctggcgtaaagagatcgccatgtagccctttaaagcggtctttcatttcgacaatcaatcgttcggcagttttcttgccgatacccggcagcttcaccagcgcaccaagctcttcgcgctcaaccgcattgacgaactgttgcgccgacatgccggagaggatcgccagcgccagcttaggcccgacgccattcgttttaattagctctttaaatagcgtgcgctcttgcttattgttaaatccgtacagcaactgcgcatcttcacgcaccacgaagtgggtgaagacgattgcctcctgcccggcctccggcagctcgtaaaagcaggtcataggcatatgtacttcatagcctacgccccctgtctccagcagcacgatcgggggttgtttttcgagaataatgcctctgagtctgcctatcacatgacgctcctgcgtaaagggctgaaaagataatgcactatcataaaaaaagactggatgtttatccagatgaaaaacacgttattcgcctatctcaatggccttcccttcgaatcggtcgcgcaacaccaccgggtgccgccgcgccccatgatgtggagatataataagtgtctataataaatataattcaataacattttctgtaagaataataaataaaaagtccagatacgcattatcactatagcttgaatttcctccggtgaaagcacatcctttataaacatttttaatcatcttgttatttaatcattcaggacagaaattcaatgttattgaaaaatattgtcataggtgcattaatggctattcctgcgctggcgtcagctaatagcctcacggaaacacgggaaagaatggccattgagcaacaagctatcgcctatactgtcagccaaaagtgggacaagctggacgctatgtttcaggaatacaataccggattcccgacaaccagcggcggaactcataaactggttatcgcatggggagggatctataatctttttcagtagatgtttccgacaatggtatttctggcgtggcaaaagagtggcttaaagcaaaccccaaatccacgggtgcaaggctgctgcaagcaatggtttttgatgctaaagccgtgaatttacgcggtgaaggtgcggccagcacggtggactctgatatatggccgaaatataaaaagctgatgattcaggaaaaagagtatctgttaaagaacaaagatattgccgacaaagatgtgacctggtatcaggaaatggaaatggtcgcacgcaatcttgaggataaagagctgctctatagcactttggaagaagccagcaaaaaatatcccgcctatcaaaatatttatatcgaggccatggttgctcgtttgcctaaatggggtggttctccggaagaagtcgaaaaaatcgccagaatggccgcagaaaaaaacaaagatcaatcgggactttcttactacgcttatatctggagtaatgcaatccattaccaacctgaattaatggctttactgaataaacgtcagattgtctcctgggacgatatgctgcaaggttggagagatcgctacaaacagttcccatcaacccgcacgcttaataatattctgataagctcctgcattgcccgcgataaagactcctttgtgaaagcagataaaatgattcaaggggaaacggagcgggatacctggccacaagggttaaattatcgggaatgccagcagtccttccaataattgccagattaccatcacagtttaatgcacagcattaattgaattaagccgcctctgccgttatatgcagaggtggtttaatgggaaatgtccttcaacctctggaccatgaacgagataaacggtaccgttgttaatcacttccttaccctttacaagaataataatcagcgattgatgaacagtacagactcgatatttttttgcattgcaacctaaccttttgcactttcgcctcctgttccccctggcgcttaatataacgcagagtcagccaaatatttgcgccaaccactcttgccagatcacacctcaaatgcctattaaaaacaaaagcaataagcatgaagagaaacacaaccagacaataacatagactcaaaaaaatatatggcgatacaaacaattatataatattgaaaggacagtccacttattccctgcgttcgtctatcttccctttcactttcacctctggaaagagataaaaacattatcaccgtaaattataatattcatgatggatatttattgataataatatcttgtcattatgtgagtataatgctaattatccaatagcgtaaaataaaggatattattttaggtaataatggaacgtgaacatgaaaaaacattattctgtccaatatgaaaccggggatatcgtctttacctgtataggtgccgcgcttttcggccagatatccaccgcttcacagtgctggagcaaccatgttgggattattattggtcataatggtgatgactatctggtggcggaaagtcgcgtccccctctcaaccgtcaccacgctgtcactgtttatacaacgttcagccggacaacgttacgcggttcgtcgcctgtgcggcggcctgacggtcgaacagaaactcgccatcatggaacaggttcccgcccggctgaataagttttatcacacggggtttaaatatgagtcatcgcgccagttctgctcgaaatttgtgtttgatatctataaagaagcattgtgtattccggtaggcgatattgagacattcgaagaattgcttcacagcaatcctgatgcgaaactcgccttctggaagttctggtttttaggttcaatcccgtgggatcgtaagacggtgacgcccgccagcctgtggcatcatcccaatttagaattaattagcgcctgtggaattgaaacccctcaacgcgaggctgagggagaatgatttagcgcaaccttccccgcgccagattgagtcggctctcgctcatttgcatcgcgttctggctaacatggcaatgcgtaatggcgatagccagcgcatccgcggcatcggcctgcgggttagcggggagctttagcaacgtacgaaccatatgctgtacctggcttttttccgcgctaccaataccgacgacggtttgcttcacctgacgcgccgcgtattcaaacacgggcagttcctgattgaccgcggcgacaatcgcgacgccgcgcgcctgtcccagcttgagggctgaatcggcgttcttcgccataaacacttgttcgatagcaaaatagtccggctggaactgcgtgatgatttccgtcacgcctgcgtatatgagcttcaaacgagacggcaaatcatcgactttggtgcgaatacatccgctgcccagataggtcagttgtctgcctacctggcggataacgccataaccggtaatgcgcgagccggggtcaataccgagaataatcgacacgctataccccctgcccgccggcgtttaacagcaccattacagggtcgccgccacctcatcagagatctcaccgttatggtagacttcctggacatcgtcacagtcttccagcatatcgatcagacgtagcagtttcggcgcggtttccgcatccatatccgctttggttgacgggatcatggacacttcggcgctgtccgctttcagacccgccgcttccagcgcgtcacgcactttgcccatctcttcccaggcagtgtaaacatcaatcgcgccatcatcataggtcacaacatcttccgcgccagcttccagagcagcttccatgatggtgtcttcatcgcctttctcaaaggagatgacccctttcttactgaacaggtacgccactgagccatcggtacccagattaccaccgcacttgctgaaagcatgacgcacttccgctacggtacggttacggttgtcactcagacactcaatcataatggccgtgccgccaggaccataaccttcatagatgatggtttccatgttcgagtcttcatcaccacccacaccgcgagcgatggcacggttcagagtgtcgcgggtcatgttattggccagcgctttatctacagccgcgcgcagacgcgggttggcatccggatcgccgccgcccaatttagctgccgttaccagttcacgaataattttagtgaagattttaccgcgcttggcatcctgcgcagctttacgatgtctggtgttggcccatttactatgacctgccataaatatttcctcaaaaaaagcgcgccttttcaggcgacgttaatgacaaactcttcaatcgcttgccggttactccaggacttggtaagcgccgccgcgtcaggcgcatcaagccactggtacgtcagatgttcagtgaatatcacctgccgctcatgcggtaacgcaaggcagaaccagaattctgtattgtgcataacgcccggcgcatagcgatgacgtaaatgtgaaaaaatttcaaactccaccgtacgttggcagtcgattaaggtcagttgctctgccgcaacatcaatcgtgacctcctctttgacttcacgcacggcggcctgcaacgcggtctccccttcttctatgctgccagtcactgactgccaaaaatccgggtcgtcgcgtcgctgcaacattagcacccgtttcgtatcctgcgcgaaaataaccaccaggaccgaaacggggcgcttgtacactttatccttcacgcgacctcgttgttggctgttgggtgacgccgcgcattgatgaggctcccccttgcgggccgccgcgatatcacgcgaatgatgtcgtgtacattgttcatatcagttattctcggctttcttcacaacctgaatacccaactccgtcaacgctgccaggttggcgaaactcggcgcttcggtcatcagacacgcggcggcggtcgttttcgggaaggcgataacatcacgaatattgtcggtgccggtcaacagcatggtcagacggtccagaccaaacgccaggcccgcgtgcggcggcgtaccgtatttcaacgcatccaacaggaagccgaacttctcgcgctgctcctgctcattgataccgagaataccaaatacggtttgctgcatttcaccgttgtgaatacgcaccgaaccgccgcccacttcatagccgttaatcaccatatcgtaagcgttagcgacggctccttccggcgcagttttcagttcagacgccgtcatgtcacgcggggcggtgaacggatggtgcatcgcggtcagaccgccttcgccgtcgtcttcgaacatcgggaagtcaatcacccacagcggcgcccatttgtcttcgtcggtcaggctcaggtctttgcccagtttcagacgcagcgcgcccagcgcatcggcaaccactttgttgttatctgcgccgaagaagatcatgtcgccgtcctgcgcgccggtacgttcaaggatagcctcgacgatgtcggcggtcaggaacttggccaccggactgttaatcccgtccagacctttcgcgcgctcgttaactttgatatacgccagtcctttcgcgccgtagatcttaacaaagttaccgtaatcgtcgatctgcttacggctaagctgtgcgccgccaggcacacgcagcgctgccacgcggcctttcggatcgttagccgggcccgcgaagaccgcgaactctaccgatttcagcaggtcagcgacatctaccagttccatcgggttacgcaggtctggtttgtcggaaccgtaacgacgttccgcttcggcaaacgtcatgaccgggaaatcccccagatccacgcctttcacttccagccataaatggcgcaccagcgcttccatcacttcgcgcacctgtggcgcggtcatgaaggaggtctcgacgtcgatctgagtaaactccggctgacggtcagcacgtaagtcttcatcacggaagcatttgactatctgatagtaacggtcgaaaccggacatcatcaggagctgtttgaacagctgcggcgactgcggcagcgcgtagaatttacctttgtgcacgcgcgaaggcaccagatagtcgcgcgcgccttccggcgtggctttggtcagcatcggcgtttcaatatcaaggaaaccgtgatcgtccataaaacgacgcaccaggctggtaattttggcgcgggttttcaggcgctgcgccatttccggacgacgtaaatccagatagcggtacttgagacgcgcctcttcggtattaacgtggttagcgtcaagcggcagtgagtctgcgcggttgatgatagtgagagaggacgccagcacttcaatttcgccggtcgccatatccgcattgacgtttttcgcgtcacgcgcacgcacggtgcccgtaacctgaatgcagaactcattacgcagttcagaggccagctttaacgcgtccgcacgatccggatcgaagaacacctgcacaataccttcgcggtcgcgcatatcgataaagatcaggctgccaagatcacgacgacggttgacccaaccacacagagtcacctgctgccccacgtgggacagacgtagctgtccgcaatattctgtacgcatgagatatcccttaacttagccgcaggcggattgttgcctgccatgcaggcgacgaagtcgcagctttagctgtatgtcacaactggatgaaaaaaggcggctattatactggaaattctgccgcacgataagagtcaatccagcatgggagcgataacttgcccgtttcatgcggtatcgacacttggttcatactgactgtacccgggtttttcacgcgggtattgcgtatgctcacaaaaattaacaatatttgtcgccgctttcctctttaatcgcgcttaaggtgtagtgaaatccgctatttttaggagagtgattatcatgctgaaactcaacgcgaccacaaccgccctggtggttattgatttacaggaaggaattcttccgtttgccggcggcccgtatacggcaaatgaggtggtcgcccgcgccgcgcggctggcggaaaagtgtcgtgccaacggctcgcccgtggttatggtacgcgtcggatggtctgatgattatgccgaagcgttaaaacaacccgtggatgccgcaacgcctgcgcacgcgttgccggaaaactggtggacctggcctacggcattgggtaaaaaggacagcgatctggaagtgactaaacgccagtggggcgcgttttacggcaccgatctggaattacagcttcgccgccggggtatcgacaccatcatattgtgcgggatctcaaccaatatcggcgtcgaatccacagcgcgtaacgcctgggagttggggtttaaccttattattgccgaagatgcctgtagcgccgccagcagtgagcagcatcagagcagtatgacacatattttcccgcgcattggccgggtacgcagcgtagaggatattttaaacgccttatgatctacattggcttgccgcaatggtcgcacccgaaatgggcgcggctcggcatcaccagtctggaagagtatgcccgccactttaactgcgtggagggcaacaccacgctttacgcgctgccgaaagcggaaattgtcgatcgctggtatgcgcaaactacggacgatttccgtttttgctttaaatttcccgccaccatttctcaccaggccgcgctgcgccattgcgacgatctggtacaggcgttttttacccgcctggcgccgctggaaacgcgtattggccaatactggctgcagttgcccgccgcctttggaccgcgcgatctccccgccttatggcagtttcttgatgcgctccccgccacgtttacctatggcgtagaagttcgtcatccgtgtttttttgacaaaggtgaggatgaacagcggctcaatcgcgggttacacgcgcgcggcgtaaaccgcgtgatcctggatagtcgtccggtacatgccgcccatccccacagcgaggccgtccgcgacgcgcagcgaaaaaaacccaaagttccggtacatgctgtcgtgacggccagccatccaatggtgcgttttatcggtagcgataatatggcgcaaaaccgtgaatttttcgccgcctggttgcagaaactcccgcagtggcggcagaccaccacgccttttctgtttttacatactccggatatcgcgcaggcgccggaactggtgaatacgctttggcatgatttacgcagcgtcttaccggaaatcggcactgctccgtccattccacagcaatcttctcttttctgaaaatgccccctatcatagacagtgccatcagccattttaaaagggagtttgtatggtaagcgcgctgtatgccgttttgggtgcgttattattaatgaagttctcttttaatgtcgttcgcttgcgaatgcagtaccgtgtcgcctatggcgacggcggttttagcgaattgcaaagcgccatccgtattcatggcaacgcggtggaatatattcctgtcgcgctggtgctgctgctgtttatggaaatgaacggcgccgaaacgtggatggtgcatatctgcggcatcattttaatcgccggtcggctgatgcattattacggttttcaccaccgcctgttccgctggcggcgggcggggatgagcgcgacctggtgcgcattgttgctgatggtgctggcaaacctgtggtatatgccctgggagttggttttctccctgtattagcgcacaatatgcgcctttatttttcccggatgtatacgttatgtctcaccgcgacacgcttttttctgcgcctatcgcccgtctcggcgactggacttttgatgaacgagtagccgaagttttccccgacatgattcagcgttcggtaccaggctactccaacatcatctccatgatcggcatgttagctgaacgctttgtgcagccgaacacgcaggtctacgatctgggctgctcgctgggcgccgcgacgctgtctgttcggcgtaatatccgccatgagcattgtcgcattatcgccgtcgataactccccggccatgattgaacgctgccgccgtcatattgatgcgtataaagcgcctacgccggttgaagtcgttgaaggcgatatccgcgatatcactattgaaaacgcctcgatggtggtgctgaattttaccctgcaattccttgaacctgccgaacgccaggcattgctggataagatttacctggggttgaatcccggcggcgcgctggtactgtcggaaaaatttagctttgaagacgcgaaagtgggcgagctgttattcaacatgcaccacgattttaaacgcgctaatgggtacagcgaactggagatcagccagaagcgcagtatgctggaaaacgtgatgctcaccgactcggtggaaacacataaagcgcgcctgcgtcaggcgggtttcgaacacagtgaactgtggttccagtgctttaatttcgggtcgcttgtcgcgttaaaagccggagttgccgcatgatcgagtttggtaacttttatcagctcattgctaaaaatcatctctcccactggctggaaacattgcccgcgcagattgcctcctggcaacgcgagcagcagcatggcttgtttaaacagtggtcgaacgcggtagaatttttaccggaaatgacgccctggcggctggatttactgcacagcgtcacggcggaaagcgaaacgccgctcagcgaaggtcagctaaagcgtattgatacattgctgcgtaatctgatgccgtggcgtaaaggcccgttctcgctttatggcgtagatattgacaccgaatggcgctccgactggaagtgggatcgcgtactgccgcatctgtcagatttaactggccggacgatccttgatgtcggctgcggcagcggctatcacctgtggcggatgattggcgcgggcgcacatctggcggtcggcatcgatcctacgcagcttttcctctgccagtttgaggcggtgcgtaaactgttgggtaacgatcagcgcgcgcatctgctgccgttgggcattgaacaactcccggcgctgaaagcatttgataccgtcttctcgatgggggtgctttatcaccgtcgctcgccgctggagcatctgtggcagttaaaagatcagttggtcaacgagggtgagctggtactggaaacgctggtcatcgacggcgacgaaaataccgtactggtgccgggtgaccgctacgcgcagatgcgtaacgtctattttattccttccgcgccggcattaaaaaaatggctggaaaaatgcggctttattgatgtgcgtatcgctgacgtttgcgtcactaccaccgaagagcagcgccgtaccgaatggatggttaccgagtcgctggccgattttcttgacccgaacgatcgcagcaagacggtggaaggctatcccgccccgcagcgcgcggtgctgattgcgcgtaaaccgtgatggattgccgaatgaccgttacgtatagcaccgtttctccaaaatagttcaagttgcagcaaggcggcaacgcagcaaatccccgggaacgtaggtagctacgtggccggggtgcgcgaggcggccaacgctgctgcggcttgaaatatgaaggagaaaaaaaggcccctgttgaattggcaggggcctggtacgagcaagcatcatattgggcgacatgatgcaacggtaaaaatcatttggcctgatggcgaacaatgattcctttcatttcagcgaccgccgcaccctctactctatagcgagaatactcgtccgcctgtatatcggcagacatcgataacccctgattgcgatagcgcatcggcgaaggcagtaagactccggcggaactgtgtacttcccgtactccggcatcgaggaaattctgcaggttatttgcacgaacccccgcaccagccataatggttggagcatccccctgggcaataagttccataattattgataaaccttgcgccgcatcggctttttgtccggaagtcagtactcttgctacgcctgcgtcagccagattctttagcgcattgaagggattagcgcacatatcgaaggcgcggtggaatgtcaccgccagcggcccggccgccgccattattttttccattcgcgacatatcgacatccccatcaacggtcaacacgccagtaaccagcccgggaaaacccaactctctgacgaggcggatatcttccagcatggcggcaaattcgccgtcagtgtagtaaaaatccccgccgcgaggacgaataatcggatgtacgggaatcgtaatatgctcgcgtacgctgcgtaagacgccgaaagaaggcgtaagccccccttctttcggcgcggcgcacagttcgatacgatccgcgccgtttcgctgcgcggtgagcgcgcattccatgctgtaacaacagatctcaagtaacgccatattcactccgctcggcaggttaatgggccgcctgttcgctggcgacaatcgcttcaatcgaccatggatgaaattttaccgtgatgcgaccatcggtcacggccagcgtagggtttggcaaacgttcatgctcgccctgtggcgaactggttttaaccactatccccggctgactaagcccctcatccgacaacaacgccagggccctcgcgttcaaggtctccggctcgccgggcagcacgatttcaatatgctcccacccctcgtgtggatagcgtttttctcccggccacggtaattcaataacagaaaaccgccagtgttccacacataccggttcatgcagtttaaacagacaaatcggcctgccgttgatgatattttccgacagtagctcgccgcattgttcaaaaccgcgacgccaacgctccgccgtcgtattctggtgacagcgcaatgaaatgtgatcggcctcaagggcgctaatctgcagaccaaggcgagtggaaagttctctgaacgccagagtgaatcgcggtaaatctgcggaaatatcatgcagttcatcaatgtgttgccagttcgccatatcaggacgctcttcttgctgtgaaaaccgctaatttacgctgttgcgccccggcaaccaacctttgatttgattgggcgtttattgaatgcttatgcagattattgttgcgtatatttcaggcgacgcgccgcgcgcgcaatgctgacgccaacgggcatttgcagtatactcccgccctaattcttaaactggcgcgggcaatacagcccgcttcataaacgtaaggtattccggtgaatattcaggctcttctctcagaaaaagttagtcaggccatgattgctgcaggcgcgcctgcagattgcgagccccaggttcgtcagtcagccaaagttcagttcggcgactatcaggccaacggcatgatggcagttgcgaaaaaactgggtatggccccccgacaacttgcagagcaggtgctgactcatctggatctcagcggcatcgccagcaaggttgaaatcgccggccctggctttatcaatattttcctcgaaccggcttttctcgctgaacaggtgcaacaggcgctggcctccgatcgtctgggcgtttctcagccgactcgtcagacgattgtcgtcgactactccgcgcccaacgtcgcgaaagagatgcacgttggtcatctacgctccacgattatcggcgatgcggcagtgcgcacgctggagtttctgggccatcatgttattcgcgctaaccacgtcggcgactggggcacccagttcggtatgcttatcgcctggctggaaaaacagcagcaggaaaacgcgggcgacatggcgctggcggatctcgaaggattctaccgcgatgcgaaaaagcattatgacgaagatgaagcgtttgccgagcgcgcgcgtaactacgtcgtcaaattgcagagcggtgatacctatttccgtgagatgtggcgtaagctggttgatatcacgatgacgcaaaaccagatcacctatgatcgtctgaacgtcactctgacgcgtgacgatgtgatgggcgaaagtctgtataatccgatgctgccgggcatcgtcgccgatctgaaagccaaaggactggcggttgaaagcgaaggcgcaacggtggttttccttgatgagtttaaaaacaaggaaggcgacccgatgggcgtcattattcagaagaaagatggcggttatctgtataccactaccgatatcgcctgcgccaaataccgttacgaaacgctgcacgccgaccgcgtgctctactacattgactcccgtcagcaccagcacctgatgcaggcctggaccattgtgcgtaaagccggttatgtgccggattccgttccgctggaacaccacatgttcggcatgatgttgggtaaagacggtaaaccgtttaaaactcgcgcgggcggtacggtgaaactggcggacctgctggatgaggcgctggagcgcgcgcgtcgtctggtggcggagaagaacccggatatgccggctgacgagctggaaaaactggctaacgccgtcggtattggcgcggtgaaatacgccgatctgtcaaaaaaccgcaccactgactatatcttcgactgggataatatgttggctttcgaaggcaataccgcaccttatatgcagtatgcctatacgcgtgtgctgtctgttttccgtaaagcgaacatcgacgagcaggcgctggcgagcgcgccggttatcattagcgaagatcgcgaagcgcagcttgctgcccgtctgctgcagtttgaagaaaccctgacggtggtcgcgcgtgaaggtacgccgcacgtcatgtgcgcatatctgtatgacgtcgccgggctgttctccggcttctacgagcactgccctattctcagcgccgagaatgacgcggttcgcaatagccgcctaaaactggcgcaactgacggcgaagacgctgaaactgggtctggatacgttgggtatcgaaaccgtagaacgcatgtaaacgcgccgtcgttaacatcatcaggcctgactccggataacggactcaggcctttttattgccacagcggtatatctgtaacaaatcacaaggaatgacacatttctatagagagatggaacatcttttacctgtgctggcgctgaccgccccgtatcattaggcggcggattgttcaggtacaggtaatgacttttaaagactttgatgcggaagagaaactcttcctgagacgtgtgattgtggcgtttggtgtagtggttgtctgctttggtatcctgatcttcaacctctataacttgcaaatccgccagcaccactactacaccacccgttcgaatgagaacgatatcaagatgctacccgtcgcgcccacgcgcggcatcatttacgatcgcaacggcattccgctggtgcgtaacgtaacctggtatgatatcgcggttacgccctataaaattgccgatatggatgcgctgctaaaacagctcacccctattgttgatctctcccccgacgatatctccgactttcgccgtgcgctaaaatccagtagccgctatcgtccggtggtgctcaaaaacgcgctaacggatgttgaaatcgcacgctttgcggtcaatcagtttcatttcaacggcgtcacgatcaatagctatcaggatcggcagtatccttacggcgcggagctggcgcatgttctcggttacgtgtcaaagataaacgataacgaccttaaagcgctggataaaaaagggctggcagagaattacgcggcggaccataacatcggtaaacaggggattgagcgttactacgaaaacgatcttcatggtaaaaccggttatcaggaggtcgaggtggataatcacgggcgtattgtccgcctgctgaaagacgttcctcccatcgcgggtaagaacattcacctgacgctggatctccatttacaagagtacattgaaagtttgctggccgggcagcgtgctgccgtactggttgaagatccgcacgatggttcagtgctggcgatggtatctatgcccagctacgacccgaacccctttgtaaaaggcattagctatcaggattacggcaaactgctgcacgataaaaatctgccgctgatcaaccgcgtgacgcaagggctttatcctccggcgtcaacggttaaaccctatatggcaatgtccgcgctgttatgcgggattattacgccgcaaaccaccttctttggcgcgccaacctggacgcttcccggcacgcagcggcattaccgggactggaaaaaaaccggacacggtatgctggatgtcactaaagcgattgaggaatctgcggatacctttttctatcaggtcgcttatatgatgggtattgaccgtatcgacacgatgttgtctcagttcggctatggcaaaccgacgggcatcgaccttaatgaagaatatgacgggctgcttcccagccgcgcatggaaacagcgggtccataaaaaagcctggtatcagggcgataccatttctgtcggcatcggccagggttactggattgccacccccatccagatggtaaaagcgatggtggcgctcatcaacaacggtaaggtgattgcccctcacctgttactcaatgaagagagcggcaaaacggtggttccgtatcgtccttcaggaacaccggcacagatagccgatccggcgtcgccatactggggactggtgcgtcaggcgatgtatggcatggcgaatgcacccaacggaacgggctataagttctttcacaccgcgccctacggcattgcggccaaaagcggcacgtcgcaggtatttagcctgaaagaaaatcagacctacaacgcgaaaatgatccccattcgcctgcgcgatcatgtgttttataccgcttttgcaccgtataaaaaccctaaggtcgctattgccttgattctggaaaacggcggaagcgacggcgttaccgccgcacccatcatgcgaaaaatccttgaccacctgtttgatccacaggctgataccacacagccggatcaggcgccatagtcaaataagcaaagcgccatcagacaaggatacggccggaatatctgcatacatcagaaatagttacgcagatattccgtcaaacacagcattgccatcgcctgcccgtaaggcatagaggtcaacggaatatgacggtaaaaatcgagatcgtggcccatgccagtgccaaatgacgtttgcagcagttcaccttccggcgagatatgtttcactatcccccgaatagctttttccgccacctgcgcatagtgccgttcgacatagcgtttgcgcaccgctttaagaataccgtaggcaaaacccgccgtcgccgacgcctcaagataagagtgcggatcgtcaagcagcgtatgccacaaaccgctttcatcctgacatttcgccagcgcggcgatctgcgcattcagtacctggaccagataacggcgcacggcattattttccggcaagtccagcagttcaagaaaatccgggatcacaatggtcagccagctgttgccgcgcgcccagcgagcgttagcgaagttatgatgaccgtcatagctccagccgtggaaccacagccccgtctctttatccatcaaattctgcacgtgcagcaggaactgataggttgcctcttccacgtattccggccggttcaacagtttaccgattttcgccagcggcagcaccgtcatcattagcgtgtcgtcccacatctgctgatgattttcctccgccagcgtgatgtgctgcattccgccgtgatcggtacggggcatttcattcatcgcccattcggcccacgtttccagccacggtaaatacgctggattacgcgtctcttcatagcgatacgccagcgttaaaaacggcgccatcgtattaacgtttttcgtcgtcgcgccttccgcaaaacgatcggcaaaccagtcatcaatgatcttacgcatcgtctggtcgccggtctgttggtaatagtgatacattccgtacaggcccacgccgtgcgtccactcccatccggcccagcctttagtatcgatcacgcgtccgtcgtccagtcgcaataaaaattcgcctgtctcatctttaatattgaccaggttatgcgtcaccttttgcaccagggcttttagttcatctctggcgataaaatgctcaggctgacgcaatagcggactgtgtttgactggataaaccatcatttgcttaacctctgtgtaatgtcgaattcagtgctgcgtgcagttttaccgccgacgcagtcgattcgctacagtaaaagctaagctgggcggaaacctttttgtttctgccattgccagagcgtaaatggcaaaaacgcaaagagtccggcaacctacctcaccattttataaaacagcgtttctatttattcaaaaagagagtcaggtctgctacctggcaaagaaaggggcggttagcggtagttcacaatcacctgattgctccgcacttttaacgccgggataagtcggccgccgccggggacttcccagacaaagcggagcggctcgactgcgggaacatgagcaaaaccgtgggtcgtgccactctgaccatcaagttctacgcaacgggactgggaacataaacgtacccgtaagcccgcgggagtcgggccattcagttcataacgccaggcgaccagcgtcatcacaccggaaaccggctggcgcgccgacaatggcgaagacgatgcggaaacaccccggtaatttaaggttacacccataccgctatcctgccacgcgccttcgcctgcggcctgaaccgtcaggggaaagagcaacaacgccagccatttacgcattattttcctccaatggtcgccgtcatgcggatatgacggttatcggaaagctcaaggttcgacaacaccaccagctgcggtaaactgcgccgcaaaaagcgggacaataatggacgtagcgcatggttaaccagtaataccggcggcgcgccaagcatttcctggcgagaaagcgcttcttgggtctgcgccagcaggcgatccgccaacccaggctcaagtccaccgccgccctgcaatgcctgaagcagcaaacgctccagcgcggtatccaggccaatcacctgcacttcttcattaccggggaaccactgttgcgtaatcgctcgtcctaatgccacgcgtaccacggcggttaattcatgcggatcgctttgtaacggcgcatgttccgccagcgtttccaaaatggtgcgcatatcgcgaatcgggactttttccgccagtaagttttgcaggactttgtgtaaagtcgtgagggtcacgacgccggggaccagatcttccgtgagtttaggcatctcctgagagacacgatccaacagttgctgcgcttcctggcggccaaacagttcggcggagaattggccaatcaagtggttaaggtgcgtcgccacaacggtactggcttccacgacggtaaagccctgaatttgcgcctgctctttcagggcgctttcaatccagatggcatcaaggccaaaagctggatcgacggttttctcgcccggtagcgttcccgccgccgtgccggggttaatagccagccagcgtcccggataggcgtccccgctgccaatctctacccctttcatcaaaatacggtagcgcgcaggctgtaaatccatattgtcgcgaatgtggaccaccggcggcaggaaccccatatcctgcgcgaattttttacgaatactgcgaatacgtccgagcaattcgccatcctgttgaaaatccaccatcgggatcaggcggtagcccacttccattcccagtgaatcctcaagctgtacgtcattccaggtggcttcgaccaccgagttattttccggcatttttaccggctgcggctcctccggcgctttttcttcacgcccgcgcagccaccatgccaggccgagcaaagcggcggtaaaaagtaaaaataccaggttaggcattcctggcaccatgccaagcagccccagcaccgccgccgccagcagcatcacccttggattactgaacagttggccaaccatctgctcgccaacatcctgatcggtactaacgcgggtcacaatgacgcccgccgccgtggagataaccagcgccgggatctgggcgaccaggccgtcgccaatggtcagcagggtgtagctttccgccgcgctgcctatgctcattccgtgctgcaatacgccgaccagcagcccgccgaccacgttaatgaccatgatgagaataccggcgatggcgtcgccgcgtacaaatttacttgccccgtccatcgagccgtagaagtcggcttcctgagtgacttccgaacgccgttttttggcctcgtcttcaccaatcagaccggcattaagatcggcgtcaatcgccatttgcttaccgggcataccatccagcacaaagcgcgcgccgacttcggcaatacgtccggcgcctttggtgatgaccatgaagttgataatgacgaggatgataaaaaccacaatcccgatcgcgaagttaccgccgaccaggaaatgaccgaacgcctccactacctttcccgccgccgccgcgccggtatgcccttccatcaaaataatgcgcgttgaggcaacgttaagcgccagacgcagtagcgtggtaaacagcaggatggtcggaaacgcggcaaaatccagagtacgctgggtaaacatcgccaccagcagcaccataattgatagcgcaatattaaaggtaaacaataagtcgaggataaaagcaggtagcggcagcaccatcatcgacaaaatcagcagaatgaggatcggcccggcaagaatttgccattgcgtcgatttcaggttgctgggcaggcgcagcatcgcgaccagattagccatcagtattcttctcgttcataaaatccagcgcttctggcaccggaaggttctcaggttgtggaggacgttgcccgcccgcaagccgccagcgtttaagctgccagacccaggccaacacttccgcaacggcagcatataactgcccgggaatttgctgaccgatttcggcgtggcgatataatgcccgcgccagcggcggcgcttctaaagtgggaacccgatgttcagcgccgatctcgcgaatgcgcagcgctattaatccagcccccttcgcgaccactttcggcgcgctcattttgttttcgtcatactgcagcgccacggaatagtgcgtcgggttagtgacaatgacgtccgctttcggcacatcttccatcatgcggcgctgcgcggcggcgcgttgcatctggcgaattttgcccttaacatgcggatcgccttcgctctctttaaattcgtcgcgaatgtcctgccgcgacatgcgtaattttttcaggtggctaaagatctggaaaaacacgtcaaatcccaccatcggaatcacgcccagtaccaccagtaacgcgcagagtccaaccagatccagcgcattccccattgcgacgatcggcgactccgccatcaggcgcatcatttgcggccagtgatgccagagataaaagccggtaacgcagccgaccagcgtggatttcaacaccgcttttagcaattccgcgccggtctgcgccgaaaacatgcgcttaattcccggcagcgggtttaatttagaaaattttggctgtagcgacttaccgctaaaaatcaggccgccaagcataaccggcgagataagcgccaccagcaccacgcccgcgatgagcggtagcagtgccatcatcgccgctttaatcagcaaaattatctgccccaggatcaggttaggatcgttcaccatacggtgatcgaagtgcaggcctgctgagagcattcccgccagctgccgcgctaacgactcgccgccgaaccaaataatacaaacgcccaccagcaatatcagcagtgaggtcagttctctggaacgggggatctgcccttcttcccgcgctttttcaagtcggtggggtgtgggggcttctgttttgtcgtcgtcgctctcttctgccacgcagcaaaccctggatagattgataagagagaatgatgccagaaccgctttacgccaataggcagagtaagcggtaaaaaaggcggggtttatggcgttaatagagatagccggatacgataagaaagtctcgtatccggccgggttgacggattcgaacccgataagcgcagcgccatcaggtcaaaaaagcttaaaagccaagactgtccagcaggtcgtccacctgatcctgactggcaacgacgccagctttcgaggtatccacctgcgggccgttgagcaagctttcgttctcgcgttttggtcgcgcgctctgttccgggatgttttccagcagcaccattaacaactggcgttcaatctcctgaatcacgtccatcatgcgtttgatcacctgacccgtcagatcctggaaatcctgcgccatcatgatgtccagcagttgcgcgttagtaaagctggtatggcccgggacatccctgagaaactggcgcgtatccgtcaccagttcacgggcgtcggaaagctcgatcggattgtcaaaccactcgtcccaacgttgggttagcgctttcgcctctttttccatcgcatcctgatgcggctgcgaggcttcgacactgtttagcgcgcgttccgccgcctgcgccgtcatctggacgacataatccagacggtcgcgcgcatcagggatcgcctccgccgcttcggcaatcgcctggtccagccccagttcacgcaggctgtcgcgcagcattcgggtcagactaccgatgcgcgcaatgatgtctcctgctgagccttcatcagcaggcttgatagatggttgcatcatcatcgcatcctcacatgcccagtttctcaaagattttgttgagcttctcttccagagtcgctgcggtgaacggttttacgacataaccgctggcgccagcctgtgcggcggcgataatattctcttttttggcttccgccgtgaccatcaacacgggtaacgccgacatggcgctatcggcgcgaatggttttcagcagctccaggccatccatgttcggcatgttccagtcggagataataaaaccaaagccgcccgcctggagcttgttcagcgcatcgacgccgtcttcggcctcttccacattgttaaatccaagctcttttaagaggttgcgcacgatacgacgcatggtcgaaaagtcatccacaaccaaaaatttaagctctttatccgccataaaatactactcctggttcaaatacgtatcgcctgtccggcactgattttcgccaacatctgctggcttacctggctaagatcgaccacttcgcttacgccacccatattgatggcctcgcgcggcatgccgaacaccacacaacttgcttcgttttgcgcaatggtccaggcgccagcctggtacatcgctaacattccagcggcgccatcgttgcccatccccgtaagaatgacgcctacggcgttgcgccccgcgtgtttcgccaccgaatgaaacagcacatccacggaaggccgatgccggtttaccggcgggccatcatgaattttgatttgataattcgccccgctacgcgccagctccatatgcttgtcgccgggcgcaatgtaggcatgacctggcaatacgcgttcgccgtcctcggcctccttcacgctgatttgacagagtttattcagacgctcggcaaacgagcgggtaaagccaggcggcatatgctgcgtaataatcactgccggactggaaagcggcagcggttgcagcacatgtcggatagcttcagtaccgcccgttgaagcgccgatagcaatcagtttttccgaactgagcagcggacccgcttttaaggttgtcggggccgccatcggtttatgtgcggcgatgcgggcccgcgcggcggtacgcactttttcggcgatcatctcgctatacgccagcataccttcacgaatgccaagctgcggtttggtgacaaaatcgatggcccccaactccagcgcccgtagcgtcacttcggaacctttcccggtcagcgaagagaccatcaccaccggcatcggtcgcaggcgcatcagtttttccagaaaatcgaggccgtccatacgcggcatctcaacgtccagggtcaatacgtccggattaaattttttgatgagatccctggcgaccaacgggtccggcgcagtcgccaccatctccatatcgctatggctattaataatttcagtcatgatttggcgcattagcgcggaatcatcaactgacaataccctgattttactcatgctttatccttacttagcgcatacaccgtctgtccgcgcaggctaaactcgcgcacgaggttgctaaagttttctgagtgaccggcaaacaacagtccgtcaggtttaaggagtggaacaaaacggcgcagaatgtcctcctgagtcgttttatcaaaatagatcatgacgttacggcaaaaaatcgcgtcaaagggaccgggtacgttgtactgcttttccaataaattaacggaggaaaattcaacataattggccagttcctgacgcacgcgcaccagtccttcatgcggccccgtaccgcgcatgaagtaacgttgtagctgctgcggcgataacgttttcagttcgctgaggcgataaataccgcttctcgctttttccagcacttcagtatcaatatcgctggcgaatactttccagcgaccgggggccatccctaacgcatccgccagcgtaatggcgatactgtaaggttcttctcctgtcgatgccgccgcactccagacgcggtactcgccgtggcggcgacgcgcatgttccgcaaggatgggaaaatggtgcgcctcgcgaaaaaaagcggtcaggttggtagtcagagcgttgataaaagcctgccactcagcgctgttttgattagcctccagcatactgagataacggccaaaatcatccagtcccagggcacgcagccgacggaccaggcggttataaaccatatcccgcttatggtcggccagcacgatccctgcgcgctggtagattaattgacatatccgacgaaaatgcgcgtcggacagcgcgaggcgctgtgtcatctgtaacaatactgacgtttgcccggagggcagagatgatgtcatagcgccttcttaatcacattcaaagtacaacgggcgcgccctgcggcagcgccatgcttcccgtattacacattttttgcttttatctatgcgaaccagacgaaaggtatcggcgggttcgcaaattaatcgataaccgacagcgcacgtcgatcagaaggtttcccagttcgcatcatccctggcggctaatgactgcggcgtattgccggactgagcgttcactgacaaacgcatctcaggtttatttaccgccagcggtcgcgatgccaggcggaaagccgataccgcctgggtcagacggctggcctgctcttccagcgcggcggcggccgctgcggattcctgaaccagcgaggcgttctgttgcgttacgcgatccatttcggaaacggccaaagcgacctgatcgataccccggctttgctcatccgaggcggaggcgatttcgcccatgatatccgtgacgcgcgtaacggcattgacgatgtcagtcatggtttccccggcgctttccaccagcacagaaccggtatcgacacgcgagacggaatcttcaatcaacgcttttatttctttcgccgcctgggcgctgcggctggccagattacgcacctcgcctgccacgaccgcaaaaccgcgcccctgctctcccgcgcgcgccgcttctaccgccgcgttcagcgccagaatgttagtctggaaggcaataccgtcgataacgctgataatgtcagcgatttttttcgaactgtcggcaatttcgtgcatagtgtttactacgccgtcgaccactttgccgccatgacgcgcggtctcggaggcgctttgcgccagttgcgaagcctggcgggcgttatcggcgttttgcttcacggtggccgtcagttgttccatgctggcagccgtctcctccagagcggaggcctgctgttcggtacgggaagagaggtcggtattaccggcggcaatttcactggtgccggaataaatcgcatccgaaccttcacgaacctgcgttacggtgtcaatcagcgagcgttgcatatgttcaaccgttcccgccagttcgccaatttcattacgtcctgagacggtgagcgttttcgtcagatcgccgctggcaatttcacggatatgagtaatcactcgcgctaatgggttaagcagggcatgacgaatgccgaaccaaaccaccatcaaaatcagcaccagcacgaccgcaagaacccccagttgccattgcgcaaaacggtagtcatgagcactttgatcaaatgtctggcggtacaggttttcgctcacccgggcgtaattgcccagcgcctcgcccaacgcgttttgcattccctgggttggctgggcgaagtaggcatccatattgccattgtccagaaactgaataagttcggctaatgcggcctgatagcgctgatatttttcatcgacgttcgcgctggcctccgccatcgctggcaatggcgtcatatttttgaaattggcgtagtgcgccgccgcctgtgcgagagtcgtttttgcattctggagtaaatccgttttggcgctgctctgctggttagaagcgtccatcatcatgcgtgcggcggagcggctcaggttaatgcgcgtttgcagcattaagtcccatgtcgacgtgagttcgctttgttgctgacgtaattcgttagaaataacaaaaccttgctggttatgctgtaatgaagaaaacagcaaaccaccggaaacaagctgtagcagtgcgaaaacccccagcaccatcatcagcattgtgacaacgcggatacggttaaacataaggcaccttcctgataacgagttatcaacgttatcggcacctgcggtgataactttacttttgcaaaaaggaaatacgctgttccggaagacgacattgccaatgacagtgtcgcagcggcgatgccggcgcaaaatgcaggggctgggcgcgggcgatgaagaggcactctcaccgctggcggaagcataacggtgaatattgccggatggcgcgacgccatccggcaacgttattacgcgacgtgtgatgctgcgatatccagcagcgccatctcttcgctgttaagcagtttttcgatattcaccagaatcagcatacgctcgccgagcgcgcccaatcccgtcaaatattctgttgacaaggtcacggcaaattctggcgccggacggatctgttccgccgttaacgacagtacgtcagacacgccgtctaccactatcccgacgacgcgttgccccagattcagtacgatcactaccgtattgtcatcgtactcaacgtcgccttcgcagaatttcacgcgcagatcgacaatggggacaatcacgccgcgcaggttagtcaccccttttataaaggccggtgtattggcgatgcgcgtcacctggtcatagccacggatctcctgcactttcaggatatcgatgccgtactcttcatttcccagtgtaaacaccaggaattcctgacctgacggctcgccggccagtttgcttacattactcataccggtcatattattcccttctcactcaatcaggcggctgtgatcgccatacgttgttcgcggtttaaaccctgcaatgcggaaacatcaacaatcagcgcgacgctgccgtcgcccaggatcgtcgcggcggaaatccccggtaccttgcgataattgctttccagatttttgaccaccacctggtgctgaccgatgagctgatcgaccagcagcgcgtaacggcgtcccgcgctttgcaggatcacaacaatgccctgcgtggcttcggttttcgccccgtccacgtcaaacactttccacaattcgaccagcggcaaatactcgccgcgaacttccagaacccgttcgccgcccgccagcggatgaagatcctcttcacgcggttgcagcgactccatcaccgcattcaacggcaggataaaaacttcccccgccacgcgaaccgacatcccatcgaggatggccagcgtcagcggcagcagaatacgaatcgtggtgccggagccttgttttgactggatctcaacgtgaccgcccatctcctgaatgttacgtttcaccacatccatgccaacgccgcgaccggagacatccgtgacctgttccgcagttgagaatcccggcgcgaagatcaacatgcctacttcatcgtcggtcatgttttcattcaccgccatcccctgcgacatggccttcgccaggatacgctcacggttaagccccgcgccgtcatcggtcacttcaatacaaatattcccgccctgatgttctgcggaaagaatcagattgccgacaacatttttccccgcctcaaggcgtttttccggcatttcaatcccgtggtcgagactgttgcgcaccaggtgcgtcagcgggtcgataatgcgttcgatcaggcttttatcaagttcagtggagctccccaccagcgtcagctctacctgcttgcccagtttgcccgctaaatcgcgtaccagacgcgggaaacggctgaagacgtactccataggcatcatacgaatcgacatcaccgactcttgtaagtcgcgggcgttacgttgtaactgacccatgctggtaatgagatcgccgtggtttaccgggtccagctcgttagaacgctgggccaacattgactgggtaatcactaactcgccgaccaggtttatgagctgatccactttctctaccgccacgcgaatgctggtggactcgcgttcacgcgcaggtttttcacgccccgcatgatgttcatgggccgcgcttttggcggctggcgcaacgactgccggaggcgctaccggcgctacctcggttttctcttgcgctttttcaaccggcgcggcgaccactttttcaaaagcgatctgatcggcctcgatgacaaaacagagcaccgcgacaatgtcatcttccgcgacgctgccatccagagttgccgacagtgaatccgcccccttaacgacatccgtcagagtagccagattgcccaactcttcttcaagcagatcgacctcattggctttcaaccgtgaaagtacaatgcgcagtttactctcgtcacgaggcgattcggtttcggctacgctctcttcctggatcgccgcgcttagtgccgcggtttctacgaccgccggcgtggtttcgcctttcgcctccagcgccaactggcgtagcgcattgcagatatattcgaagcttgcggcatccggctcttcggagtttttataggcgtcgagctgttcctgcataatatctttcgtttccaaaaacaggttgataatgtcggtattgagctgcatttcaccgcgtcgggcttcatccagcaggttttccattaaatgcgtggtttcctgcagaatagtgaagccgaatgtgcccgcgccgcctttaatggagtgcgccgcgcgaaaaatggcgttcagttgttcagcgtccggggactccggcaccaaatccagcagatgctgctccatatcagccaacagctcgtcagcttcatcaaaaaatgtctgataaaaatcgctaatatccatgctcacgctatcacctcggttccgcttttggcgatgtgggtacgcttgccggcggggctgccgcaggctgttgtaatacacttaccggctcattctggctttcagcgttttcatgcaaaatggcctgttccgcctgtttgtttaacaccagcaggcttatacggcggttgatggcgtcatcaggaccgcgatcgctcagccgcatcgtggcggccatgccaaccacccgtaatacttttccgttatccagcccgccagcgaccagttcgcgacgagaggcattggcgcgatcggcggataactcccagttgctatagcctttttcgccgttcgcgtagggaaagtcatcggtatggccggccaggctaatgcgattaggtataccgtttaacactggcgcaatcgcacgcaggatatcgcgcatatacggctcaacttcggcgctgccggttttaaacatcgggcggttctggctgtcgataatctggatgcgcaacccctcctgaactaaatcaattttcagatgcggacgtaacgcgcgcagtttgggatcggattcgatcagttgatccagatcgccgcgcagtttgtttaagcgactctgctccatccgttttttcagctcgtcgatattcggctgcttttccacttcaccctgctgttgggtgtaatcatcgccgccgcctggtatcgggctctcgctattggcaatccgattcccccccgttaccgcggtggccaacggcgtacgaaaatattcggcaatctgaattaattctttagggctggagatggaaatcagccacatcaccagaaaaaaagccatcatcgccgtcataaaatcggcgtaggcaattttccaggaaccgtgcgccccgccgccgtgcggtttgtgcctgcggcgttttacgacgacaatgggatgagcctgatttttcatgcttcctcagtcgtctgctgctggtttgggtttctcactgcgcgaacgtgttcttccaactcaataaacgatggacgctcactggaataaagcgttttacgaccaaattccacggcaatcggcggcgcatagccgttcagattagacagcagtgtgatttttacgcactgcatcatcttggtggtttcggcgctcttctggcgcaaaacggtcgctaacggtgaaatgaatccataagccagtaaaataccgaggaacgtacctaccatggcatgggcaatcagcgcccccaactccgctgccggacgatcggctgaagccagagcgtgaaccacccccattaccgccgcgacgataccaaaggcaggcagcgaatcccccaccatcgccagactgttggccgggacttccgcctcgctttcatgggtttcaatctcttcatccatcaacgcttcaatttcgaacgtattcatgttgccgctgatgatcaggcgcagataatcgacaataaaatcaagcattaccgcatcggccagaatacgcggataactggcgaagatttcactctcttttggattttcaatatcgcgttcaagggagaacatcccctgctggcgtgatttggccatcaggcgatagagcaacgccagcaaatccatgtacatagattttgtgtatttcgaacgacgaaataacaacgggatagctttcatcgtgcctttgatggccttcccgttgttgccgacaatgaacgcccctatccccgcgccgccaatgatgaccagttcagcaggttgatagagtgccccaaggtgtccgccggtcatgacataaccgccgaaaactgtaccgataaccaccaggtaacctaataagataagcacgacatcatccttccgctgttgactatgacaggatgcgcagtcgggcgattaacgcgaaggcaaggcaaaaaaaagcagcggtaatgacttaccgctgctggagtgtttgtccacaccgtttcggttaaacagcctgttcgatctgttcatccagcagttgtggaataatatcggcagcatctcgggaaagtttacgtctttttactgcgcgggatggcggctggcataaactacacgcaaagctgcctacgggctgatgcgcatgggtaataaagttcccaccgcagcagttacagctcgacaattcaagcaacccactttcaacaaaacgcaccagcgtccatgcgcgagtcagcgccaacaacggcccttcaggcggttgcggacactgctcaagataaagccgataagctttaatcaccgcatccacaccgctgcataagccggtcttcagtaaaaattgccaggcgttgcagaacatggaggcatgaatattttgctcccaggtcataaaccagtctgtcgaaaatggcagcatccctttaggcggcgggctaccgcgtaattctttgtacagcctgatgaggcgaccacggctgagctgtgtttcgctttccagcatttgtagacgagcgccaagattaatcaactccatcgccaactggatatcgcgagcttcctgaacaatgcttttttcactcattatcatgcccttttcttacgcgccgtatcgtccacttcattgagcagacgcgttgaaagcatgatacctgtgtgaatctgctgtaagtcatcgacgcgcgaatcctgagtcaaacgggtgatcgtctgatgatcgtcaaaccggaaatgacaaactaactggttcgtctccgccagtttgaccatctgcggcagggtcaacgcgcccagtgtgtttgccatctcttcgttgataccgaggcggaacatcgcagatgctttgtcctggacgatcaaacgctgtgcaaggagtaaatatgacaaattgatgtcataaatgtgttttagcaactcggatgtatgcattgttcccatccagaataaccaactttatttttgtgcgacgtagccgcaccccgtgatgtcgccgggaaggcccggtaaaagaagcaaaaaggtcaaatgcatagcagcgctcagacattatggacattgtgacgtataacgcagcctcccactgagattcgccttacacgtttacatcaatttttacaaatgcctaagatttttcctaattcgacgcaactctactcgtcagcttcgtgacatacaacggagcgggacggcgattttagaaaatatgtgatgcagatcacatattttaacggaatacttacgataaaaccatcagcatggcttttactttgtttaattaataacctaatgttcactttttctattccacactgctgaataggggtacgtcaacaccaaattcttttttgtttctctctgttaaaataacgccaggataatagataacaggctattatttctattttagaaacgcttttattttacctttagtaaacagtagcttaaatattaaacgttattaattaatctcgtcacagcatacgccctccgctgttaaaaataagctcatttgatttaacttttagctttccttgttcacccatttaaatgaagcatccgggtggtgtgtaaaaagtgtcttatgccacgattctttacataagaataattaatgattaattatgatgtccttcacattaatgtggcattagcgcattgcagaaatgcgataaacagagtaaagctaaagcacaatctcatattcttgcaatcaaggagcgagttatgagctacacccatattcttgtcgccgttgccgtcaccccggaaagtcaccagctactggctaaagcggtctctatcgcccgccctgttcaggcgaaagtaagcctgattactctcgcttccgatcctgaactgtataaccagttcgccgcgcccatgatggaggatttacgcgcggttatgcatgaagagaccgagaattttcttaagatgctgggggaaaaggcggattatccgattgaacaaactttcatcgcatcaggtgagttaagccagcatattttggctgtgtgccgcaaacaccatgttgatctggtcatttgcggcaaccataaccacagtttcttttcgcgcgcgtcctgctcggcaaaaagtgtcgtcagcgccagccaggtagatgtgttgctggtgcccttagcgggcgactagtcgccgctcgcgatatttcaggccagcttagggaacgtcgccacgttgttctgctgctgacgctcagggctacgcggcgtgacctcctttaggtcatgaataaaacgctcctgccagcggttaatgtcatttttaacgatcacgtccagcatctccgcatgacgcgaaatacgctcggcaaggggcatcgttagcgcacgattgagcgccgccgccacgtcatcccgatcgtaaggattgacgattaacgccgacgtcagttcattcgccgcgccggcaaactgtgacagtaccagtacgccagggttagcggggtcctgcgcggcgacaaactctttcgccaccaggttcatcccgtcacgcaacggggtgacgagcccgacgtctgaataacggaatatcttcattaacagtttacggtcgaaatgttgattcagataatagagcggcgtccagcccaattgtccatatttcccattaatccggcctgcttccgtctcaagctggtggcgaatatcctgatatgcctgtacttcgccgcgtgacgtaggcgcaatttgggtataacgaatttttccccgatgctgcggatagttttccagtagcgcttcatacgccagaaaacgttccggcagccctttcgaataatccagccgctcaacggaaaaaatattcttcacatttttcagttccgccttgagctgcgccagtttaggcggcaacggcccggcagcctgcagagcaatctcatcgggctcaataccgataggatacacttctgtctggaagtctttaccccacgcgatatgctgcttgccgctgcgagtcgtgactcgcgtttgactcgaaaggctatccagaaaagccaggcgatcattttcggtctggaaccctagcagatcaaagtcacacaactgctccagcagttcatcatgcggcggtaaggcgttaaaaatctccggggtcgggaatggaatatgcaggaaaaaaccaattcggttgttcacgccgcgtttacgcagctcgctggcgaacggtaacaggtggtagtcatgcacccaaatgatgtcgttctctttaatgaggggcaataacttatccgctaataacgcattcacccgcatatagccttcccatgcaggacgctgaaactgtaccaggtccagacgatagtggaacgcaggccagagaaccgcattggaaaattgacagtaataatcttcgtaatcttgttcgctcaggttaaacgatgcccaggtaatattaccttttgtcaccttttttaatggctcatcctcgttacctgtctcgccactccagccgaaccacaacccgccagccgcttttagcgcgccaagcacgccaacggcgaggccgccggcgccgcctttattatccggggggcaattcgattagatactacgactaaacgactcatagccatctctcctgttattcattacttgttgttcttgttgtggataattgatttgttccagccagcgccagacatcgggtacgctttccagccgccatgccgcctgggttgccccgacgcccacttttacggaaattccgccagcgtgattcaccacgccaaagccagcctcatcggtcaaatcgtcgcccacaaaaacgggaatccgtcccgcaaagggcgcctcctgcataaaggcggcaatggcttcgcctttattggttcccttaggtttgatttccacaacacatttaccaggctgcaacgccagttgcggccagtgctgcgtaacgtgttgcgcaagcgccaacagcgccgcttcatgttccggagcctgacggtagtgcagcgcaaatgccatccccttcgactccagctccgttccgggcagcgctacaagcgtcgaacgtaataacgcctctacctcacggactaccgcttcaggaaggcgcacgatatgggttttaccattgatgtcacgacgctctgccccgtgaacgccagcgagtggaaagcgaaaaggcttcgccaaagcatccagctcagtcattgaacgccctgaaatcaatgccagtgcccctgcgttgtgcgccgcgagacggtctaacaactgaaggattttatgcggtaccactacctgatcgggatgaggctttatctctgccaatgtgccatcaaggtcaaaaaaatacgcatagttcgcagtgagttcgggggatacggttaacggttctgccaccctggtctcctccttatcatcatattgagactcacaaacggtctcattagtcatgtaagtatagacagtgtgacgctgctcgccatttagaaagaccatcgccagccggggtagcggctggcgatgacgtgaagctatactgtttagttgagtgttaattcatcaaatcgtacgcttcgctttttgcttataatggtcgaagataactgttgtcagaaggattcagccgcgaaccatacactgtgcaaaaggtgaaatgttgagcaggttcatcgcgctctccaccgctcctgatatcagtacgctcgccaccacatatgagacttttccgaggccgcctttcaggaatcccccccctaagacacacgcagaaataacgattaactcataacccagggaagtcattgacctgctttagcgttttttatgtagggtaaaatcaaacaattcttgttagagaagacgtaaaacggtgcactgtctttcattcattagataaatgctgatggcaggaatagttttagcggaaaatgacataacccagagcgaattcatcagccaaaaggcaggaaagccagcacattaatccataacatcagccagctaatccttacggccctgggtgaataacgattaccagggataatagatatgttcagcctgttcgcgaaccggcgcatcgtctcccagcagtctggcggaaagggttagcgcgaaatcaaagacatgacccaaccctttgccgctaattaaattaccatcttcaaccacgggcgcatccacatagacaccttccggaaccgctttccacagatcgccggaacagacataacgacgccccttcagcaatccgtgagcacccagcacccttgccgccgcggaacagataggacaaattaatttgcctgccgcatcatgacgcgcaacgaaagcgatcaccgccggattagccgccagattagcgctcccctgcggaccgcccggtagcactaccgcatcgaaaagcgcctgctggcgttcactcagcgtgctgtccgcaaccataggaatatcatggtaactcaccaccgcccgtgattcagcacacgccagcgtttcgacgtcgatatgcaaacgtcgcagaatatcaagagtaacaatggcctctgcttcttcaaatcctggtgccaacagcaccgcgacctttttcattgactgctccttgttaacgagtcacccagcaaaactgcgctcaaccgaataacgtgctcgtatgattaatgatattaaaaatgatctaccgcaaaatcggctagtttataaaaacaggcatatttgctctcaaccgtttatgcgtgtgatatccagactgactaatgtttattttattgaaattaacatacttgaaaggcttaacccatgatctgaaacaatgtttcataaattacaaatctatataatatcatttaactttcaaagggttgcaactgctcctcatccaaaatcattacacctgaaaaaatcacaccgctgaaaatgtaaaaaaagataaacaattacatttaaggattttcttatttttattgacgcgctattctcattaccgatcgataaacaggaaatgagatcgcataagggactggcggaacggagttcttctgctaagagtatttattgtgcatagaggtaagaatgtgacaacggcccgttgcattctcgtctgtcatgcacatcaacactttctggaaataaggatattgttatggcagctgtaggaatggttcaaaagctcaacacgccaatgaaccttgagttttacgcatcaaatctttacctccatctaagcgaatggtgttctgaacacagtttaacaggcaccgccacctttcttcgtacccaggcgcaaggcaacgtgacgcaaatgatgcgcatgtttaattttatgaaaaacgccggcgccacccctatcgttaaagccattgacgttccgggtgaagagctctgctctctggaagaattgttccagaaaaccctggaggattatcagcaacgcgccagcacgctgtcgcgtctggcagatgaagcgaaagcgctgaatgatgcctcaacgcttgattttctccataccctggaaaaagagcagcagcaggatggcgtacttttacaaactattctcgaagaagttcgcagcgctaaacgagcagggctatgcctggcgcaaaccgatcagcatctccttaacgtcgtgacctatcagcatcactgatagcggcaccccgagcgacaatattgagacgttattagccggatagcaacgcgaagcagcttatccggcctacaccgtttctgatctgtttgccagaggtggtgcctgtcgctactggcgtattatcggcacatcatgccagccgacaggcgcgaaacgcctctgtcttgtctgggcattaccccagcatctcacgtacaaacgcttctatttctttattctggccgttttcaaacaaacattgctggaaacgcggccctgaaaccgccgttttaaccagttcaggatcgatagcccgtagtgtatccagataattctctttgacgaccgcggccttaacctggttcaaaatgcccgcattgcgtacctgcggcgctttgcgctcaggcggatacccctcgcctttacgcccggtaaacgctttttcaaagatgaaacgcacgttcagctcagcgccccagccaaagcctttcgcaaatggcagggacaacgcattgccgttgttgatctgcgcaaacagaaaagcatctgccggatcgatgcaatagccacaaatgacacctggatgaatatttaacgacatcagcgcgccctgaccagtgccacagccagtaaccacaaaatcaaccgcgtttgcattaagcagaatactcgccatgatgcctaaatgaatgtacgtcaggtgatggtcattttcgtcgcacatgccgacgttaaaaacgggaaatcccttttcattggcgacggcgctaagttcgttataaatgatggcatttttgctggcctggctattttccatcatcagtgcaattttcatcgtgtttctcctgaatgcagacggtcgcgcctgcgtaaatcatgacgttttacccacattacacatttgagaacacacattcaaatttaataaaaccaggtttcattaaatgaaaagacgctcacacattttctgttcccgctgtaaatcccctgccgttacctttaatcaaggcgaatccgtaagttattccagccattgacagtgcaagacacgaggtagcatggtctgataccgaactgtcggagcgattttatgaagcctcttatttttactctttcactgctagccctgacgggatgcaccattactcgacaagcgcaggtcagcgaagccagcccgataagcggcatcgtgcgcctgacgtataaccagccgctattttttacttcacggacagatgattatgtatctcacgggaccgcaacacgcgaatgccagcagatgggctatgccgatgccgtttcgtttggtcagccggtaggaacctgtagcatttatgcgggctcgttgtgtctgaacacccgatttaccctctcctggcagtgccggggcgttgccgtcccgcaaatcatgccgctttattattaaggcggctggcttaacgtcgacaccatctacaatggaggagagtgcagggtcgctattgccagcatgaaggtgctggctttcctttatttttatacgctatacactggcgttaatgcgttttattcccattcgtatttttaataattaaatttaatattttaccttttgcaaataataaaataacaaattatagtggcgccacattaccgtatatcttttgctatttgtggagcggaaccatgctgaaaacagaaatgatcgacaaactgaatgagcaaatgaatctggagttgtactcctccctgctctatcaacaaatgagcgcgtggtgtagctatcacagttttgaaggcgcggccgcatttcttcgtcgccatgcgcaagaagagatgacgcatatgcagcgcctgtttgactaccttaccgataccggaagcctgccgcgcattcataccgtttcttcgcccttcgctgagtacgcctcgctggatgagctgttccgcgcgacctatgagcatgagcagcttattacgcaaaaaattaatgaactgactcatgccgcaatgaccagccaggattatccgacatttaatttcttgcagtggtatgtggcagaacagcatgaagaagaaaaattattcaaatctattattgataaattaacgctggcgggaaaaagcggcgaagggctttatttcattgataaagaactctccaccctggatacgcaaaattaatccaacacgtccttacacggtgagacgcgctctcaccgtggcgtattaatggcggcagattttactctcatgcgttgaaaaaccgtcctccaccgcaataaactttcctttcgccgccagaaacgcgaccagttccgccgccgtcatatctgatgctgaacaagtgtgaaatcgtgcccgctcgccaaagcgcgcttttattgccgcctccagcgaggtatgcgtgtactgctcgccagactcaatcatcatgttgagcacttcgtgaccatgaatggaatccataacccctcctgaataaaactcgtagcctaatgtgtccgtgtacaagcgactttgcgctagcgcaggtttacggcggttgtccgcgtctccttccatattcgcttttatgcccggaactgtaaattttacagtacacccattgtaacgaccatttgacgaaaatagcgtaatgccttaccctgcgccgcggatatcaccgttctttgttaccggggtagtagaaagcgtgaaaaacagaactctgggcagtatttttatcgtggcaggcaccactatcggcgccgggatgctggcaatgccgctggcagcggctggcgttggtttcagcgtcacgctgggattgttgattggtctgtgggcgctgatgtgttataccgcgctactattactggaggtatatcaacacgttccggcggataccgggctgggctcgttggcaaaacgctatcttgggcgttacggacagtggcttacgggattcagtatgatgttcttaatgtatgcgctcactgccgcctacatttccggagccggagaattactggcatccagtattaataactggcttggcgccacgctctcgcccgctgccggagtactgctgttcacctttgttgccggtggggtggtatgtgtgggcacctcgctggtcgacctttttaaccgcttcctgtttagcgcaaagatcatttttctggtcatcatgcttgcgttgctcacgccacatattcataaagtaaatcttcttacgcttcctttacagcaggggctggcattgtccgccataccggtcattttcacctcgtttggttttcacggaagcgtaccgagtattgtgagttatatgaacggcaacattcgccggctgcgttgggtctttatgacgggtagcgccattccgctagtggcctatattttttggcagctcgccacgctgggaagtatcgactcgccgacattcagagggctactggccagccatgccgggttaaatggcctgctgcaggcgctcagagaagtggtcgcttcgccacatgtcgaactggcggtccacctgttcgccgatctggcgctggcgacctcttttctgggcgtagcgctaggattatttgattacctggccgatctattccagcgccgcagtacggtgtccggacgcctgcaaaccgggctgattacctttctgccgccgctggcgtttgcgcttttctacccacgtggatttgtgatggcattaggctatgccggcgtagcgctggcagtgctggcactactcatccctgccatgctggtctggcaatgccgtaaacagagccctcaggcgggatatcgtgtggcaggcggcacgccagcgctggcgctggtgtttatctgcggcattgtcgtgattggcgtccagttttcgatcgcactggggttcctgcccgatccaggttaacgccaggcaaagattaccgggcccggacgccgtccaggctcgataatcatcacgctatggccgtttacgagccattaatgcaggcagcactgcttaaattttttgccgctcccgcatggacaaggatcgttacgccccactttcacctctgcttttatcggcatctgtagcggcgtcgtgtgcggatgcgccatccaccaggcatgcagctcaagcgccgcgatacggatagcgtcaacgcttttatcgaacgcttccgggctcattttatccaacagcgcaaagttttcttccgtgccgtgtaaggcaatcgcttccagcgccggttttagcgtatccggcaagtcagaccagtcggacagcgacactccgcgcatgtaaccaaagcaccattcttcaacaatcgttaattcatggccatcaacttctcgcaggccaaacagcggctcgaactgttctggatagtcttcaagccgggcggctgtgtccgccatgtgctggaacaccagatccataaatcgcgtcatttctttttcagatgtccagcgcggtacgtacgcgggtcccccccatatcgcgaccagccactgttccgggtcgatgggacgcggagaacttagtaccgcagtaatcagaccgtccagctccgcgacatccaaaatggcctgatcggtattgtatttcgtcagcacatcatccagccattccagctcgttctcgtttaatggttccattttcataacgcttttcctcagtgatgacttccgcctgtaggcctcttacattgcagcggataaaaataatttttttgcaggcagttggatggcaaccatcaggggccagattaacacgaaatgaggaggattccggaagttaacgcacaaaaggaggatcagggcgcagattttccgccaggaagcgctcgccccacacaaaagcgagagatgggtttctcgctatattatactcatgctaacttataccaccgccgcggacagataaaaccgccctctcaaatagagcttattttcagtaaaaaagtgtttaatgagttcgtctaccgcttctctgtcagcagaaaaggttatttccataaacagcgtatcgtaccctattttgatattttttttcttacagtaaacacggatctcatcctgcacactcagcaacggcaggctaaatgtgtatagcggttgcggttcttttttcgccgctttctcaaaaactttagtgaccagatccccaagatcgcgctctgaccgggcaccgttattaaaatgcaataaattacgtctttttaccacccagcctccagccagataccgccaacaataactctcacttcaatgtgtgaggcacataatcacatccagaatcagctccagatagtatttcaaataaacagcccgcactatagcgcatacttttttcagacacagtttacagggatactctctttatatccacgcgcacggttgccttaatcatgtcttccgcgataacacagtttgtcaacctattctatataaccaagcttaaacagaaccttaccagccagtgatatcagctcaggactttcaggataaaaacgcagtaacggcaaaaataccgcctcaccgataatgctccggctattagcatggtttgggcgcaatccccagatattctgataagtcatcggcacgacctgcccattcatggttgtgttaccgatatacagcataatatgccctggaatatagaccagcgtagtaaacggttttccgtatctggtgagataatcgatccgcatttggggacttttatgactaagatcgaccacccgtccagcagcctctacctgcgcggatgaatgtctgggcaggaatatgccaaacggcattaacaggctgcggatttcggctgaacaatcattataaaagttaaaatttccccaaccgtagggggcgccgtacattgctttcattagcacggcgatattttccggcgtcattttccacggcatagccgtaaactcgttaccgcttagccagacccaatggataaacgcgcgaccgttgctgccgcgaactggcgccgcaatcaggaactggcccgcccgttgatgtcggaacggtaaaatagtgcccggtcgcccggtgaaataatagacgcctgcgacatggacagaaaccggcgcgttgataaatgcccccagttgcttatgagcaagcaaaacccactgtgttataaatttctgatccgtactggcaatatcttcactatgaacccagccagttaccgctggtgaaacgacatattgccagcgttggtctttgctcttcgtcagcgtatagaccggcgtaccgggacgcagcgaagacatttgtaaattatcaaacgggtacccctcgcccgcctgacggggatcgttaaagagcgggtcgtccgttggcagcgctctgactaaactttctctgaccataatacctcgccgggaggcatgatagatattgtcaatctgcgtatccgtattccctctaacctcctctttccagcgagaggtataaagtctgaagttttcccccaataagcactgccgtcgctaagaaactgcttaatactggcatcccgcgcctgtgctgcgttttttttcagcaatgcggtaatataaaaaccattccacggcgagtgcgcttcactgtccattccgaaataatgagattttagtgcgttaaagtagcgttgttgggtagcattatcaataaccggaatagtgtaatcagccgagtccggaggtatccatttatcaaccgactgtgaataatccgctaacggaaagcgtgtttttgtcgggtcaatatagctccctgtgaaaatttcatctttggctgttgatcggtaggtcgtctggtggcaagcggtgaggcacaatggtatcaataaaacggcccaggttttcttttgcatcatcatctccgtaaagcggggaaagcataatatagagactgaccaaaaccgccattcacgaaaacctgaaattatctgtagttgacctgttattaagacaatattgcaaaacgtgattaaagcatgatgcggatcacattaccttatgatgaatattagttcgctatctacctttaattaaactgtgcagaaaacaccctgaacagttatatactcgtttaatttgcataaatactccactgacccgcccctgtttttttcagacaatacatactgtagcgcgtcagttctactttttttatatactctgcaaagtcgttttcatcgacgtagccaataaaattacgcgcatcacatgtcgaagaggaaagctctcctggaaaagagtaggttacgattgcactctcaggctcatacaaaataaaaaaaagtagcaaagcgcaacctacaatcccaatattaatgaagctaataaataattttgcattatcggtatatttcactggcagacctactctctttaataaagcaggcataaaacatatcagcattttttatagagattaatggattttatcggctgatttacccgacgtttagtaattaccaggcataagttcttgcgggtcggtagcacataactgttgtactggcagaaatgccgctaccgatgttttttactgtgtatcgcgctggaaagttcacgctcgcggtcggcatacaaattgaaggcacaaaaaaaccacccgtaggtggtttcacgacactgcttattgctttgattattcttgtctttcccatggtacccggagcgggacttgaacccgcacagcgcgaacgccgagggattttaaatcccttgtgtctaccgattccaccatccgggctcgggaaaaattggaggcgcgttccggagtcgaaccggactagacggatttgcaatccgctacataaccgctttgttaacgcgccaaacttttttggcttttcagccagcatccgctttacgccaatgcttttaaactggagcgagaaacgagactcgaactcgcgaccccgaccttggcaaggtcgtgctctaccaactgagctattcccgcagtatcaagcaactttgttaatcacttgattttgttatcgtctggcaatcagtgctgccgttcgatgcgttgcattctacttacctgacgcactgagtcaacgatatttttcgtcactcacgatcgtttgctgaaatttgcggcgaaacgatcactgatcaagcaaatctccgcgtgcagcgctcaaatattgcaacatggaccacaatgttagcaccgctgcgacaaagaaaagcgcgatcccggcatactctacccagatattcggacgccacaagagccacgccagcgccaccatctgcgcggtagttttgactttaccgatccaggagaccgctacactactgcgtttgcccagctccgccatccattcacgcagagcagagataataatttcgcgggctatcatcgtcgccgcaggtaacgtcacccaccagctatgataatgctcggtgaccagcaccatggcgatcgccaccagcaccttgtcggcgacggggtcgaggaaagcgccgaaacgcgtactctggttccagcgtcgcgccagaaagccgtcaaaccagtcggtaatagcggcaatacagaaaatcagcgcgctgaccatcggcgcccaggcgaacggcaaataaaacaccacgacaaagaatggaatcaggatgacgcgaaacagcgtgagcaacgtagggatattaaattgcatagtgacgggtaactatctgttgtcagtgaaattacccctatgttgctacagtggcctcaatgtttcaacgaccagaagatcttttctgccagaccttgcgaaatacccggcacttttgcaatttcttctacgctggcgttacgtagtccttgcaaaccgcccatatatttcagcagcatctggcgacgtttaggcccaacgccttcaatagtttccagcgtactggtatttttaaccttcgcgcgttttttacggtgcccgccgatcgcgtgatcgtgcgactcatcgcgaatatgctgaataacatgcagcgccggcgagtccggcggcaggctaaacccctcgccttccggttcaaaaaagagtgtttccagaccggcctttctgtccgcgcctttggcgacgccaagcagcaaaggacgatgcttatcccaggggacatccagctcagcgaaaacggctttcgcctgggcgagctgcccttttccgccgtcgatcagaataacatccggaatcttactttcttctatggccttgccataacgccgacgtaacacctgattcatcgccgcgtagtcatcacccggcgtgatgcccgcgatattataacgacgatactcggcgcgtaacggcccgttagcgtcaaataccacacaggatgcgaccgtttgctcccccatggtatggctgatgtcaaaacattccatccgcttgatcgcaggaagttttaataccgccgccagcgcggtcaaacgctgcgtgatggtggactgctgcgagagtttagtgattaaggccgttgccgcgttggtccgcgccagcttgagataacgggcgcgatcgccgcgcggttttgtctggacatgaatacgccgtccggcaagttccgacaacgaatcggccagcagcgttttatcactcagattaaaatcgagcagtatctcgcccggtagcgtgcgcatctggctaccctgcaggtaaaactgcccgacaaaggtttccaccacttcgcccagttccgtaccaccaggtacttttggaaaatagctgcggctgcccagcaccttaccctggcgaataaacagcacatgcacacaggccatacccgcatcaaaagccacgccgataacgtcgagatcgtcgcccgcattggagacaaactgtttttccgtgacccggcgtaccgcctggatctgatcgcgaatacgcgccgcctcttcaaatgccagatcctggctggccttttccatccgggcaatcagctgtgttaagacctggtcgtccttaccggacaaaaacaaccggacatactccacctgttgcgcatactcctcctcgctgaccagtcctgcaacgcaggggcctaaacagcggccaatctgatattgcaggcaaggacgcgagcggttgcgatatacgctgttttcgcactggcggatagggaaaattttctgtaacagcgccagcgtttcccgcacggcatagccattaggaaatgggccgaagtactcgcctttcgcatgtttggcgccacggtgcatcgccagacgcggatgggtatcgccgctcagaaaaataaaaggataggatttatcatcacgcaacaacacgttgtaacgcggttgatacaacttgatgtaattatgctcaagcagcagcgcttccgtttcggtatgcgttaccgtgacatcaatgtgttgaatttgcgcaactagcgcttcggttttacgcgaagccaggttgctgcgaaagtagctggaaagacgctttttcaggtcttttgctttaccgacataaataaccgtaccgccggcgtcatacatacgatagacaccgggttggctggtaacggttttcaaaaacgcctttgcgtcaaatatttcactcactggcttgttaacgtctccgcattacacaggccatggcggattgccaggtgagtcagctcaacatcaccatgaatgtttaatttactgaacatacgatagcgatagctgttcaccgttttaggactgagattcagctgttctgaaatctcattgaccttctgacccttggtgatcatcagcataatctgcaactcgcgttcagacaaactggcgaacggcgtttccgtttttgcaggctcaatctgactgagcgccatctgctgagcgatatcggaggcgatataacgttgtccggaatacaccgaacgaatagcgctcaccacctcctgaggcgcagcgcctttgctgagatagccagctgcgccagcctgcatcactttggcgggcaacgggttctccgtatggacggtcagcatgatcactttgatatccgctgtcgagcgggcaattttacgcgtcgcctcaaggccgccaataccgggcatgttcatatccatcagcacgacgtcaacggcgttagtacggcaccattttaccgcatcctctccgcagcacgcttcaccgacaactttaatgccctttatatcttcaagaatgcgtcgtatccctgcgcgcaccagttcgtggtcatcaacaagaagaacgttgatcaaaggaatatctccagaatagggataacgctactgatagttaatcgtccttatattagctggttttatctcaactttgaaacgtaaaaaaacaccgggtattcgattttgctctcgtttttggaaattatgttgtacgtcatgtggcaactgccaacgttgtagccccttctggcggcgctgtcccgggctgatatttcataatggtgacaaaaatttcacgttccgctgtctaaacactaattagagaatcaactttgtaacaataattaacgagtgaaatacgcgtaataaacaaagaatgaagaaaatatatgcatcacgcggcaacgtttattttgtgggtaacccctccgctttttgatcaaaaaacaaccactgctatttttagcgtagcttatggtatactccgccgccttaacatctgctatcgcacattttcactgaaacataacgaggaaaataaatgagtacgcctgatttttccaccgctgagaataatcaagaactggctactgaagtcaactgcctgaaagccatgttaacgctgatgctgcaggcgatgggccaggccgatgcagggcgcgtgattcttaaaatggaaaaacagatcgcgcagatggatgatgaagcacaagcggcggtattttccagtacggttaagcaaattaaacaggcttaccgccagtagtaaaaaaccggctgttagcatcgctttcagccggtttcgcgtctggcgcgaagcatcgtcagcacgtcatatcagacctgtcgccgcagcgtagcaggcaatctgtgttttatttggcgcattgaatttcttctgcatatttttctgatggaagttaacggtattttcagaaatcgacagaataatggcgatctccgatgaggtcttcccttccgccgtccacttcagaatctctttctcacgtttactgaaacgcatttcaggcgccatcaccatgtcgtcttcaaatcttgtcagcgccgaaagactctcccgcgccagcagttgcaacctcagctccacttcgtcgtaggtaaacgaggagcagcgtaaactgctacgggagaaagataaaaagcccagcgcccggttcggcaacatcacacactgggttacgcctctgcgtaatccgaaacgctgggcggcatcccacatcgccttcgcttcatgaaatagcacgtcatcccaatgtaaatgaccctgcctgaaattttccggctttaataccggatcgatcgcgaaatagttttcggactggtaatgcgttacccacgccggaggataagtggtacgaagcgatattttaggccgggtaaaggggacgggatgacgaacacacagggcataataatcaaattccagccgctgtgtctgatattgcaattcagtataaacatcctctgctgccgccatctcctgaaagcgtaacaacattgcgcgtcgccaggtgaagaaatcattttcctgcatattttatggtcacgcctttgatattgataatcattattatgaatgacttaaattaacacataaatagtgtttatatataagaaatatcggacgaaacgtagaatacttgagcggcattacactttttggcttccgcctgagagcgaggttaataatctggcagaatgacttcataattattcattgcgctcgcccaaggcgcggctaattcgggcgagcgttgaaaaggcattatttcactaaaaatttctcaaggaactggcgggtacgcggatgctgaggatcggcgaacaaggttttcgccggcccctgctcgacgatttgcccctgatccataaatattgcccgatcagccacgtcacgcgcaaagctcatttcgtgagtaacgatcaccattgtgcgcttttcctgcgccagctggcgaatcgtattaagcacctcgccgactaattcaggatcaagcgccgacgtcggctcatcaaacagaatcacttccgggcgcatcgccagcgcgcgcgcaatcgccacgcgctgctgttgcccgcccgacaggcggcgcggataacgggactctttaccggccaacccgactttggctaacagttcccgcgccagcgccgtcgcctcggctttcggctctccctttacaatcaccggaccttcaatgatattttccagcacggtacgatgcgggaacaggttaaaactctgaaagacaaagccgacatgctggcgtagctggcgaatcaaccctttttgctggctgaatgggcgggcggtatcgatgataatatcgcccactttaatggtgcccgcttccggttgttccagcaggttaatacagcgtaataacgttgtcttccctgagccgctcgggccgataatggcgacgacttctccgggcttcacctcaaggtcaataccgtgcagcaccgtttgaccatgaaattttttgaccaggttggtaacttcgatcgcactcattttggctctctctcctggcggttaagctggttttcaaaatagttttgcagtgccgataagacggtcgccattacccagtagattaacgacgcggccagatacatggtaaacacctccagcgttcgcgaggtaattaactgcgcctggcggaacaactccggcacctgaatcgtcgcggcgagcgacgtatctttcaccaggctgataaagctgttgctcaacggcggaagcgcgacgcgagcggcctgcggcaaaatagcgcgacgtagcgtttgccacggcgtcatgccaatgctcgccgccgcttcccattgtcccttgtcgatagccgagatcgccgcgcgcagcgtctcggacgtgtaagccgcggtattgagcgataaaccaatcatcgccgccgggatagggtccagctcaataccaaattgcggcaggccgtaatagatcataaataactgggcgataagcggcgtaccgcgaaaaatcgagatataaaagcgcgccagccagcgaaccggccatagcggagacatccgcatcagcgccagcacaaatcccagcagcagaccaaaaaacataccgccaatactcagttgcagggtaaagacggcgcctttaagcaaatacggcagcgattcaataaccagttggatactttcttgcattcgcgttgattacctggaggttatacatgaggatggtaggcaaacagcgcaggcgccccaccggtgtgaataaagagaatcggcccgtcatcgttaaagcgtttctggctgatgccgtctatcagacccgccatcgctttaccggtatataccggatccagcagcaccccctccaggctcgccagcagtttcaccgcctccatccccgcgtcatttggcacgccgtaacccggggcaaaatagtcatcccataaatggatatccgccgtcgccgtcagcgccagctgaccggcaatagcctgctgcaaggcaatcactttgggtttctgctcggcgacagaacgtgaaacggtcacgccaatcagttcgacatccggcatcagatgttccagcccgacagctaacccggcgtgcgttccggcgctgccggaggccaccaccaccgaagagagcccgacgacctcttcacactgctgggcgatttccagggcgctctctacgtatcccattgcccccagcgcgctggaaccgccgaccggaatcacatagggcctgaacccttgcgcttcaatgcgcgtcgccagcgtttgcagctgcgcatccggatcggttagcgcatcgcacatctcaatttgcgtattaaataaatccagtaacaggcgattaccattcgtcaggtaattttccgcggtggtaccgattggattttccagcaaggcgacgcaatgcagtcccaatttggccgcgactgccgccgtctgacggacatggttcgactgaatcgcccctgcggttatcagcgtatccgccccttctcgcagcgcgtcggccaccaaaaactccagcttgcgcagtttattgccgcccattgcaatgggcgtaacgtcatcgcgcttaatgtaaatctcacggccaagataatcagacaatcgcggcaggtattcgagcggggtcggcgcgccgataaactccaggcgagggaagcgcgttaagtgatgtagtggcattgagcctccggtaacgttgtggtgtgttctttttattatgcacgttgatctaacggaaataaaaaaggcgccgattcacgcgcctccgtttgctgacatagtatgaggttgatattgcccggtggcgcactgcctgccgggcaacgtagaacattattgggtcacgtcagcgccaaaccatttttcagagagcgcttttaaggtgccatctttttgcatttccgcaatggcgttatctaccgccttcagcaagtcttcgttgcctttacgtaacgcaacgccggactcctgacgcgaaaacgcatcaccggtgacggccagcgtacctttggtttttttcaccagatccagcgccgccagacgatcgactaaaatcgcgtcaatacggcctacgcgcagatcctggtattttgtaggatcatcgtcataggtacggatatccacgccctgcacatgttgacgtagccactcttcatagttagtccccagcccaacgccgacttttttgccctgcagatcggcagccgttttgatcgtgccttcattgccttttttcaccagcgcctgaatgccggagacagtataaggcgtagagaaatcatattttttcttgcggacgtctgaaatcgtgacctggtttatcaccacatcaatacgtttagcgtccagcgacgccagcattccgtcccatttggtcggcttcaacgacgctttaacgcccagatgttttgccaacgcctcggcgaaatcgacttcaaaaccggttaatttgccgtcttcgccctgaaagctaaacggcggataggtaccttccagccctaccagcagcgtgccgcgttctttaactttgttcagcaaaccctcatcggcaaagctcttcgcgctcattcccgccaccagcgctacagccattactcccatcagtgcctgacgtcccagcagtgctaatttcatagtaaccccgaatattgccgttaatgaccatagactgtgtcccgccatggcgcatcgtcacgtctcgcgaacctttgggggactcagcctaatgtagaaggtttgccacgtttcaccaacacgactctgctacatcttatgcttttttaatatatatcagaactggcggtaaagggggatttctgtctgggcgcaatctgctgatgcgctttatattgctggtatttacgcagtgcgatacggtaattattggtgctggtttccggcaaccatggcgccaggctttcatcgagaaaaccgtcctgcagcagatcgtgggaaatgttttgctcgctgaggtaattgccaaggcgtcgtaaacgcacgacatattcccgcaccgtgccatggctcatctcggtttgttcaaacaaatactgcttgaaaccgataatatcgaaaaaatcactctgctttttgcagtgcaaatcgccgcaaaagcgacacagcgccacccactccttctgctcccgctgccaggcagcgtcgtcaagtagcatatccagctgtgaaatagcgattttattaacgatcttgccacggcgaaccagcgtaatgcggtcgagcagtttgtgacaatgcgcgcaatgcgtctggctgtgtttaaagtctttaagatagcggctcaaaggccgccttttaggttgctgcaccgtcatgagaactcctggtagtctatacgttgtgcggcacttttcgggtgcgatcatgcgcgacctataacttacccagtttggtgcgtaatcgtttgatggcctgactatgcaactggctgacccgcgattcgccgacttccagtaccgcgccaatctctttgagattgagctcttcctggtaatacagcgttaacaccagttgctcgcgttccggcagcgattcaatcgcatccattacccgctgtcgcaggtcgccctccagcagttgatgtaacgggttttcctgttgatgttcttcagtcaccagttcgatgctatcgccatgctcttcccgccactcatcgtaagagaaaagttggctgttgttggtatcgagcaacatctgacgatactccgcaacagggatgccaagacgttccgccacttcggtttccgtcgcattacgccccagttcctgctccagttgtcccatcgcctgcgccacttcgcgggcattacgccggacgctacgcggcacccaatcgcggctgcgtaattcatccagcatcgccccacgaatacgctgcactgcgtaagtggtaaatgccgttccttgcaaagcgtcatatcggtcgaccgcatttaataacccgatgccgcccgcttgtagcagatcgtccagttccacgctcgccggcaatcgcacctgcaggcgcaatgcttcgtgacgcaccagcggtacataacgctgccacagcgagtgtttatccattacaccttcagcggtatacagtgaattcacgataaacagccctgcgttaaatgagttatcggcatgattatccgtttctacagagggttctatcgaaggaataaggctataaaagaagggttatttcacttatgtaacctgtagcgcctttttagcggctaaaagagcagaataaaatcagccagatagaataaatatcctccggcatagccggaggtttttcagatgcgcctataaggctctcttaccagccgcgccctaacaggcgcatacgatctgacatttgcatcaaacttcgttacttacggcccgtaaacgggctgcccggatacgggatcgataattgctcacccattttatcctcttcaagctggtgctttatgtagtcctgtatcttcgccgtgttcttacccaccgtatcgacatagtaccctctgcaccagaactccctgttcctgtatttgaattttagatccccaaactgctcgtaaagcatcagactacttttacccttcagatatcccatgaaactcgacacactcatcttcggcgggatctccagaagcatgtgaatatgatctgcacaacattctgcttccagaattcgtacgtttttccattcacacaattttcttaatatgctgcctactgccctacgcttctctccatagaacgcttgtcttcggtatttgggcgcgaaaactatgtgatatttacagttccatcgggtgtgcgctaagctcttttcgtcccccattgggacccccttttgatttcttgttgaacttttgcagttgccagaccgcaagatgttttaacaaatcaaaaggggttttaataactggcttaaagctgaaagctttccggaacccccagcctagctgggggttttccatagacaataaacgggatgcgcaaaagcccaccccgaacaaaactatgtcagaagatgaatcatcgacagatcgtcgccagtacgcaccgtttctatatggcgatgaaaattcttcgccacctcgctgttatgctggctgcgggagtgaaaactatacacaatattggtaacgtcatcccactctatacgcccgcgctcatgcacgctggctgccgttaatagcttaataaaggcatattccgccacgataatatacagcgcgcgtaacgggtcgacattcggctggttggggaaattattttcccaaattttatagagaattaaatttctgaaggcccagttcttctgctgctcattcgcctgtaaacagcgcgctaatgaggactcaatatcgctaaccttctgctccattgaaacgccctcttccgccgtcagcacccgcagaagacactggatgtagtgatcgaggataacactgccacgattaagcgggagcgagcggaaatagtcctgcatctgcaataccagcgaggtttttaccttgctatccggcgcgatattcattaactcctgcgccagcacgccggtctgcaactgttcaagtaacgcggcatacacctgttccagttcgcccagcgcggcatcatcaattttggcaaatttctgtgcatacatgacgaatttaatcaacgcatagagcgcggcttccgtactgctgttggcatggttgatcagactcaggcaaaacagattgagtaacttttgctgcgctgggaataacggcgcagtattgaatgtctgctgaatgattgttttttcgctgagtgccattgcgtcaggatcgtttaaaatgcgggacgtcacctccgggcaggcaagactcagagagttacgcacctcatttttataggtatgatgcgcccgcgggaaagaggaacaggtatgacttaatgcctttgcgcctaacgttttttgtacccggcacagacggtcctcatccagataagggcaattccccagcgccgaaggcagcttaatttcgccccagtggctgttgttctttttcagcaggataatatggtcttgcgcgatggtacgaatcgtcgtgtctttactggcgagatattttttaaccgtcgtcttatccagcgtgattttccagcccttacaacagtggtcgcgacaggccgagccagaacaggaaaagcgggtgacaaaggcaggttcagtgacggtgatttctttcattacacaggctccggaattaaaaaaggcagctttcgctgccttgattgtgtaccacgtgtcggtgaatcaatcgccggattaacgcagtaaagagaggacgttttgcggaacctggttcgcctgcgccagaacggaggtaccggcctgctgcagaatctgcgcgcgagacatgttggaaacttcggtcgcgtagtcggaatcttcgatacggctacgggcagaagtcaggttgtttacggtgttgcccaggttggtaatagcggagttgaaacggttctgtaccgcacccaggtcagaacgtaacgtgtcaacctgtgccaaagcagcatcaattttctgcagcgggttttcggtggttgtagcagccgcttccgccagatcaggctgtgctttaaagttgtgaccttcggctttacttgcagcgtaagttttaccaccaatagaaacaacttcggttttgccgtctgcgccacccagtttgtttagtgcagttttggatgtaccgtcatctgcagtgtatttcgtagtattaatacttatggaaccatctttattttgagttgcagaatagtaatcatcgcctaccttaactgctaaaccaccatcaatagttttaccgttattatcagtataagacatcttaacaacagatgctgtgccggtaacacctgctgctgtcaatgcggctttagcctctgtcaaatcagcatttgcaacttgtacatttttcacatcctcagttgctgtcgcaggtagtccacctgtaagcggggaagtcgcaccgccagcaagagtcacctcaccgttcgtcttatcaacggaaacttcataatagccatctttaccagttccccccgtaacggtaactttggcgtaatattttccagtcgtatcatcaaattttaaatcgccatcaattttctggtcagtaccaccaagaccagtagccgaggctttaaaagtactattgtctaaagcaatcgtagtatcggcatatcctgtaacagttgcagccgtatcgctgaccttatatttttgttgcacattcagcgtatccagacccagggtctgagagttgatctgcttcagatcgatatcgatagtttcaccgtcgttggcaccaacctggatggtcagggtgttgtcctgcgccaggactttcacgccgttgaactgagtctggccggatacacggtcgatttcgttcaggcgctgggtgatttcagcctggatggagtcgaggtcagactgggagttggtgctgttagcagactgaaccgccagttcacgcacacgctgcaggttgttgttgatttcgttcagcgcgccttcagtggtctgcgcaatggagataccgtcgttagcgttacgggaagcctgagtcagacctttgatgttcgcggtaaaacggttagcaatcgcctgacctgccgcatcgtctttcgcgctgttgatacgcagaccggaagacagacgctcgatagcggtgcccagagcggactgggatttgttcaggttattctgggtcaacagcgacaggctgtttgtattaatgacttgtgccatgatcttttccttatcaattacaacttgatgttattgggctgttgcccacggtttctcaccgtaacccttgtatcggcacctgaatttcgaactttagaaaatttttcacttcccccgatctttttcttaggcggcgaaatagccgctttatgcatcattattccgcgcattatttttgcaaaattatcattaaactttgcctccagattgccgataacgcgcttaactactgtttgcaatcaaaaaggaagaaggcatggcttcaatttcatcattaggtgtgggatcaaacttaccgttagaccagttgttgacagacctgacaaagaacgaaaaaggacgcttaacgccaattaccaaacagcagagcgcgaattcggcaaagctaaccgcctatggcacattgaaaagcgcattagaaaaattccagacggcaaataccgcgttaaataaagcggatttatttaagtctaccgtggcgtccagcaccactgaagatctcaaagtcagtactaccgctggcgctgccgcagggacttataagattaacgtaacccagcttgccgccgcacagtcgctggcgacaaaaaccaccttcgcgaccaccaaagagcagttgggcgatacgtcggtcacgtcccggacaattaaaattgaacagccgggacgtaaagagccgctggaaattaagctggataaaggcgacacctccatggaggcgatccgtgacgccatcaatgacgccgacagcggtatcgccgccagtatcgttaaggtcaaagagaacgaattccagttggtgcttaccgccaatagcggtaccgacaatacgatgaagatcacggtggaaggcgatacaaaacttaacgatctactcgcttatgacagcaccaccaataccggcaatatgcaagagctggtgaaagcagaaaacgcgaagctgaacgtaaacggcatcgacattgagcgtcagagcaataccgtaaccgacgcccctcagggaattacgctcaccctgaccaagaaagtgaccgacgcgaccgtgacggtaacgaaagatgataccaaggcgaaagaggcgattaaatcctgggtggatgcctataactcgctggtggatacctttagctcgttaaccaaatataccgccgttgagccgggcgaagaagccagcgataaaaacggcgcgctgttaggcgatagtgtggttcgtactatccagaccgggattcgggcacaatttgccaatagcggcagtaattctgcgttcaaaacaatggcggaaattggcatcacccaggatgggacttccggcaaactgaagattgatgatgataagctgaccaaagtactgaaagataacacagccgcagcgcgtgagctgctggtaggcgatggtaaagaaacgggtatcaccaccaaaattgccaccgaagtgaaaagttatctggcggatgacggcattattgataatgcgcaggacaacgttaacgccacgctgaaaagcctgacaaaacagtacctgtccgttagcaacagcatcgatgaaaccgttgcccgttacaaggcccagtttacccaactggataccatgatgagtaagctgaataacaccagtagttatttgacccagcaatttacagctatgaacaagtcctgataacagaggtcaccatgtacaccgcgagcggtatcaaagcttatgcgcaagtcagcgtggaaagcgccgtgatgagcgccagcccgcatcagttgattgaaatgttgtttgatggcgcgaatagcgctctggtgcgcgctcgcctgtttttagaacaaggcgatgttgtcgcgaaaggtgaagcgttaagcaaagccatcaatattatcgataacgggctgaaagccggcctcgatcaggaaaaaggcggtgagattgcgacgaatctttccgagctatacgactatatgattcgccgtttactgcaggctaatttgcgtaacgacgctcaggccatcgaagaagtggaagggttactcagcaatattgcagaagcctggaagcagatttcaccgaaagcatctttccaggagtctcgttaatgacctcaaccgtggagtttatcaaccgttggcagcgtattgcgctgctcagtcaatcgctgcttgaacttgcgcagcgaggtgaatgggatctcttactgcaacaagaggtctcctatctgcaaagtattgaaacggtgatggaaaagcaaactccaccgggcattacgcgaagtattcaggatatggtcgccggatacatcaaacaaacgctggacaatgagcagctcctgaaagggctgctgcaacagcgactggatgaactgagtagtttgatcggacaatccacccgccaaaaatcactcaacaacgcgtatggccgtctttccggtatgttactcgtgccagatgcgcctggcgcctcataatattttcccgtctcgtatgaaaattcttccatactccagaggtcggctaaacgacttctggagcacggaagatgaaaaaccccacgttattgcagtacttccactggtattatcccgacggcggtaaactctggtctgagctggcggaacgtgctgatgggctgaatgatatcggtatcaatatggtctggctaccgcccgcctgtaaaggcgcctccggcggctattccgtaggctatgatacctacgacctgtttgacctcggcgaatttgaccaaaaaggaactatcgcgacaaagtacggcgataaacgccagttactgacggcgatagacgcgctcaaaaaaaataatattgcggtgctgctcgacgtcgtcgtgaaccacaaaatgggcgcagacgaaaaagaacgtattcgcgttcagcgcgtgaatcaggatgaccgcacgcaaatcgatgacaacatcattgaatgcgaaggctggacgcgctacaccttccctgcccgcgcgggccagtattccaactttatttgggactatcactgtttcagcggcattgatcacatcgagaatcccgacgaagacggcatttttaagatcgtcaatgactataccggcgatggctggaacgatcaggttgatgatgagatgggtaatttcgactatctgatgggtgaaaatatcgattttcgcaatcatgcggttacggaagagattaaatattgggctcgttgggtcatggaacaaacccactgtgacggctttcgcctggacgcggtaaaacatatacccgcctggttttataaagaatggattgagcatgtacaggcggttgcgccaaaaccgctgtttattgtcgcagaatactggtcgcatgaagtggataaactgcaaacgtacatcgatcaggtcgacgggaaaaccatgctgttcgacgcgccgttgcagatgaaatttcacgaggcctcgcgccagggcgcggagtatgacatgcgccacattttcaccggcacgctggtagaagccgacccttttcatgcggtgacgctggtcgctaaccacgatacacaaccgttacaggcgctggaagcgccggtagaaccctggttcaaaccattggcctatgcgctgatcctgcttcgtgaaaacggcgtgccgtcagtgttttatcccgatttatacggcgccagctatgaggatagcggcgaaaatggcgagacctgtcgggtcgacatgccggtgattaaccaactggatcggctgatcctcgctcgtcagcgttttgcgcacggtatacaaacactctttttcgatcatcctaactgtatcgcctttagtcgcagcggtactgaagagaatccaggctgtgtggtcgtactttccaatggcgacgacggtgaaaaaaccctcctgctcggcgacaattacgctaacaagacctggcgtgattttctgggaaaccgggatgagtatgttgtaactaatgatcaaggcgaagcgacgttcttctgcaacgcaggcagcgtcagcgtgtgggtcattgaggacgtgtgatgagcgttcccggcggcagagcgctgccgggaagcgaaattacggcagcggcgtcggcagcggcgtcggcagcggcgttttttctaacgcggcggcgcactccggcgtcggacgagcgacccgttgcagcgtcatgccatcatattccagggtattcccgtcgcgctcaatctcatagagctcacgcttaaccgtaacattggttaagtcatcggagagcatggtcagcttgcccggcagagcaataacgcgctgccactggcggcagtccagcgtatcgccttctttagtcaccaccaggctggcgatagcttcagggctcaccagcttacgttgcgggccttttgactgccagtacccttccagaccggccggcgcgggcgttttcaccacatcattatagttttccacctcggcgcatccggccagaaccagcaatgcgccaacgatcgctacttttttcatcattcatcctgcatcagaagaaagaagaattgtggcattaaagccctgacgccgccagcctttccaggcgctggccgcaatttgatccagtcggtattaccgcttattaggtgtaggcaaattctgtgatcggtgtagtatgcgcacttcttgtttcacaccttctgagttcagaggctaaacacatgtcatggcaacacttcaagcaaacctggttaattaaattctgggcgccggcccctgcggtgatcgcagccggtattctctctacctactattttggcatcaccggcacgttttgggccgtgacgggcgaatttacccgctggggcgggcaaattttgcagctttttggcgttcatgccgaacagtggggctactacaagctgattcatctggaaggtacgccgctgacgcgtatcgacggcatgatgatcctcggcatgttcggcggctgtttcgccgcggcgctgtgggccaacaacgtaaaactgcgtatgccgcgcagccgaatccgtatcgtacaggcggtggccggaggcattatcgctggcttcggcgcgcgtctggcgatggggtgtaacctggccgccttttttaccgggatcccgcagttctccctacacgcgtggttctttgcgctggcgaccgctatcggctcctggttcggcgcccgctttacgttgctgccgatatttcgcataccggtgaaaatgcagaaggtctccgcggcttcgccactgacgcagaaaccggatcaggcaagacggcgtttcaggctcggtatgctggtctttatcggcatgattggctgggcgttattaacggcaatgcatcagccgaaactggggctggcgatgctgttcggcgtcgggtttgggctgctgatcgaacgcgcgcaaatctgctttacctcggcctttcgcgatctgtggatctccggacgcgcccatatggcgaaagcgattattttcggcatggcggtcagcgccattggtattttcagctacgtgcagttgggcgttgcacctaaaattatgtgggctggcccgaatgcggtcattggcggactgctgttcggttttggcatcgtgctggcgggcggctgcgaaaccggctggatgtaccgcgccgtagaaggccaggtgcattactggtgggtaggcctcggcaatgtcatcggttcgaccatcctggcttactactgggatgatttcgcgcccgcgctggcgaccagttgggataaagttaacctgctgaatacctttggtccgctgggcggtctgctggtcacctatctgttgttatttaccgcgctgatgttaatcatcggctgggaaaaacgttttttccgccgtgcggggctgacgcctgctaaggaatctgtatgaaaaatatcgtccctgattaccgtctggatatggttggcgaaccttgcccgtacccggcggtcgccactctggaagcgatgccgcagctaaaaaaaggtgagatcctggaagtggtgagcgactgtccgcaatccattaataatattccactggatgcgcgcaatcacggctatacggtgctggatatccaacaggatggcccgacaattcgttatctgattcaaaaataagcgcatactcccgctgtacgttacggcgggagaccttttacggcataaccggcaaaaatctacaacgcataaaagaaatcagacaaggtcgtcttgtgcgccgtggcataaatctattatataacgtataccgttttaattttgtctgagccgatgaaaaatccagggttattttaatcaaaacataaaacaattattattttccgtctacgccataaaagactatcaggtatttatatttttactcactgacatcatcaggtgatgatttatttatgcacagcagaagccaaaaaaatgataaaaattattttcatctccattattggagtcgtctgtcttgccgctgcccgttattcacccgtcacagtggtcaatgcacatccgagcgccattgcccgctgtctcgctgataatctgtccccgtatgggtatatactggatctccatgaaacagatattccaggcattaataaagaatttaccgtgtattatcgcaacggcgcatatattgcaggaacattctggattgcaaactcaatgacaatagcatcagaacgaatagtaggaatgaatggcgttagtaaacaggcgtaccctatttttaataaatccctgcaacaatgtgcaacccgcttatcaataaaatgagcgcgcctcgcaaaaataagcccacataatcacgcactggttgcatgggcgtcgcgtcccccgccgctgacgtaggtaagcgcccgggagttcgctgcggatgtgttgtcagccctggcttaaacctgcatggacatgacttcctgatacgcggcgaccagcttgttgcgcacctgaatccccatttgcatagagacggacgctttttgcatatcggccatcacgtcattaagcgcaatgcccggctcacccagagtgaatttttccgcctgaacgcgcgccgccgcttgtctgtcgctaatacgatccagcgcagcatgtagctggccggcaaaactcaccgtcgactgcgagtgcgtgtcttgcccgcgcgcggccatcgccgtcgcctgtaactggctaataaccccttcaatcccctgtattgctgccatgctattcccctggatgattttttacgcagcagagattaccagtttgtcaataagataaaggcgttaaataacgataaaaaacctcggtttttagcgcatagaaaaattcgaaaccacaaataatgagaccgtcaatttttcgagtttgctgacccgggagtgagtcttgttccactttgcaaaaaacgccgtccacgatcagtcacgaggtgcgagatgagtgcgactgcatcgactgcaacccaacctaaacctctcgagtggcttaatcgcctacgcgcgaatccccgaattccgttaattgtggcgggttccgctgccgtggcgatcgtcgttgcgatggtgctgtgggccaaaacgcccgattaccgcacgctatttagcaacctttccgatcaggacggcggcgcgatcgtcgcgcagttgacccagatgaatatcccctatcgctttgccaatggcagcggcgcgattgaagtgcccgccgacaaagtgcatgaactgcgtctgcgtctggcgcagcaggggctgcctaaaggcggcgcggtaggctttgaactgcttgatcaggaaaaattcggtatcagccagttcagcgagcaggtgaattatcagcgcgcgctggaaggtgaactggcccggacgatcgagacgctggggccggtaaaaagcgcccgcgttcacctggcgatgccaaagccgtcgctatttgtgcgggaacaaaaatccccttccgcctccgtcaccgtcacactggaaccgggacgggcgctggatgaaggacaaattagcgccgtggtacatctggtttccagcgctgtcgccggtttgccgccaggaaacgtcactctggtcgatcaatccggtcatctgctcacgcaatccaataccagcggtcgcgaccttaatgacgcgcaattaaaatttgctaatgatgtggaaagccgtatccaacgccgtatcgaagccattctgtcgcctatcgtcgggaacggtaatgttcacgctcaggtaaccgcccagttggattttgccaataaagagcagacggaagagcactacagcccgaacggcgatgcgtcgaaggccactctgcgttcacgtcagttgaatattagcgaacaggtaggcgcgggctatcccggcggcgtgcctggcgcgctgtcgaaccaaccagcgccgcctaacgaggcgccgatcgccacgccgccgaccaatcaacaaaacgcgcagaatacgccacaaaccagcaccagtaccaacagtaacagtgctggcccgcgtagtacacagcgtaatgaaaccagtaactacgaagtggaccgcaccattcgtcacaccaaaatgaatgtgggcgatattgagcgtctctccgtggccgtcgtggtgaattacaaaacgctggcggatggcaaaccgctgccattgaccgccgatcagatgaaacagatcgaggatttaacccgtgaagcgatgggtttttctgataaacgcggcgatacgctaaatgtggtgaattcaccgtttagcgcagtggataacaccggcggcgaactgcccttctggcaacagcagtcctttatcgatcagttgctcgcggcaggtcgctggttgctggtgctggtggtggcctggattctgtggcgcaaagcggtacgtccgcagttgacgcgccgcgttgaagaagcgaaagcggcgcaggaacaggcgcaggttcgccaggaaaccgaagaagccgtggaagtacgccttagcaaagacgagcagctccagcaacgccgggctaaccagcgtctgggcgctgaggtgatgagccagcgtattcgcgaaatgtcagacaacgatccgcgcgtggtggcgctggtcattcgccagtggatgagtaacgatcatgagtaatcttagcggtaccgataaaagcgtcattttgttgatgaccattggcgaagaccgggcggcagaggtgtttaaacacctctccacccgcgaagtacaggcgttaagtacggcgatggctaacgtgcgtcagatctccaacaaacaactgacggacgtactatcagagtttgagcaagaagcggagcagttcgccgcgctgaatatcaacgccaacgaatacctgcgctccgtactggttaaagcgctgggcgaagaacgcgcctccagcctgctggaagatattctggaaacgcgcgataccaccagcggtatcgaaacgctcaactttatggaaccgcagagtgccgccgacctgattcgcgacgaacacccgcagattatcgccaccattctggtccacctcaaacgcagtcaggccgccgatattctggcgctgtttgacgagcgtctgcgtcatgatgtgatgctgcgtatcgcgacatttggcggcgtacagccggcggcgctggcggagttgaccgaagtgctgaatggcctgctcgatggtcagaacctgaaacgcagcaaaatgggtggcgtaagaaccgcggcggaaattatcaacctgatgaaaacgcagcaggaagaagcggttattaccgctgtgcgcgaattcgacggcgaactggcgcagaaaatcatcgacgagatgttcctgttcgaaaatctggtggatgtggacgatcgcagtatccagcgtctgctgcaggaagtggattccgaatcgctgctgatcgctctgaaaggcgccgaaccgccattacgcgagaagttcctgcgcaatatgtcccagcgcgccgccgatatcctgcgcgacgaccttgccaaccgtggcccggttcgtctgtctcaggtggaaaacgagcagaaagcgattctgcttattgtgcgtcgtctggcggaaaccggcgaaatggtgattggcagcggcgaggatacctatgtctaatgaattgccgtggcaagtctggacccccgacgatctcgccccgccgccagaaacttttgtgccggttgaggctgataacgtgaccttgacagaagatacgccggagcccgaactcactgccgaacagcagctggagcaggagctggcgcagctaaaaatacaggcccatgaacaaggttataacgccgggctggcggagggacggcaaaaaggacacgcgcagggataccaggaagggttagcgcaggggctggagcaaggacaagcccaggcgcagacgcagcaggcgccgattcatgcccgtatgcagcagttagtgagcgagtttcagaacacgcttgacgcgctcgatagcgttatcgcctcacggctgatgcaaatggccctggaggccgcacgtcaggtcatcggccaaacgccggcggtggacaactcagcgctgattaaacagatccaacaactgttgcagcaagagccgctctttagcggcaagccgcagttgcgcgtgcatccggacgacttacagcgggtggaagagatgctgggcgccacgctcagtcttcacggatggcggttacgcggcgatccaacgttgcatcacggcgggtgtaaagtctctgccgatgagggcgatctggacgccagcgtcgccactcgctggcaagagttgtgtcgcctggcggcgccgggagtgctctgatgaccacgcgcctgacccgctggcttaccgcgctcgacaactttgaagccaaaatggcgttattgccggcggtgcgtcgttatggacgtttaacccgcgccactggcctggtactggaggccaccggtctccagcttccgctgggcgccacctgcattattgagcgccaggacggccctgaaaccaaagaggtggaatcagaagtcgtcggttttaacggccagcgtctgtttctaatgccgctggaagaggtcgaaggcattctgcccggtgcccgcgtttacgcccgtaacgggcatggcgacggtctgcaaagcggcaaacagttaccgctcggcccggccctgcttggtcgggtgctggatggcggcggtaaaccgctcgacggactgcctgcgccggatacgctggaaaccggcgcgttaatcacgccgccgtttaacccgctacagcgaacgccaatcgaacatgtgctggataccggcgtacgcgctatcaacgcgttgttaaccgtagggcgcggtcagcgtatgggactctttgccggttccggcgttggtaaatcggttctgcttggcatgatggcgcgctacacgcgggcggacgtgattgtcgtgggacttatcggcgaacgtggccgcgaagttaaagattttatcgaaaatattctcggccccgacggtcgcgcgcgttcggtggtgatcgccgccccggcggatgtctcgccgctgctgcgaatgcagggcgccgcctatgccacccgcatcgccgaagactttcgcgatcgcggacagcatgtgttgctgattatggattcgctgacgcgctatgcaatggcgcagcgtgagattgcgctggcaatcggcgaaccgccagccaccaaaggttatccgccctcggtgttcgcaaagctgccggcgctggtcgagcgtgccggtaatggcatccacggcggtggctctatcaccgcgttttataccgtgttgaccgagggggacgaccaacaagatcccattgccgactcggcacgcgcaatcctcgacgggcacattgtcttgtcccgccgtctggcggaggccgggcactatccggccattgatatcgaggcgtcaatcagccgggcgatgaccgcgctcattaccgagcagcactatgcgcgggtacggctatttaaacagttgctttccagtttccagcgtaaccgcgatctggtcagcgtcggcgcctatgccaaaggcagcgatccgatgctcgataaagccattaccttatggccgcaactggaagcgtttttacagcaaggcatttttgaacgggccgactgggaggactctctgcaggcgctcgatttaattttcccgacggtgtgataaagcaggagggcgacgatcatggcacaacatggcgctctggaaacactcaaagatctggccgaaaaagaggtagatgacgcggcgcgtttactgggcgaaatgcgtcgcggctgccaacaggcggaagaacagctcaaaatgctgatcgattatcagaatgagtatcgcagtaatttgaacaccgatatgggcaacggcatcgccagtaatcgctggatcaactatcagcagtttattcagacactggaaaaggcgatagagcagcatcgcctccagcttacgcagtggacgcaaaaagtcgacctggcgctgaagagctggcgtgagaaaaagcagcgacttcaggcctggcaaaccttacaggaccgacaaaccgcggcagcgctgttagctgaaaaccgcatggatcagaaaaagatggatgaatttgctcagcgtgcagcaatgaggaaacccgaatgatcaccctgccccaactgatcaccaccgataccgacatgaccgcgggtctgacgtcaggaaaaaccaccggttcagccgaggactttctggcgctcctggcgggcgcgttaggcgcagacggcgcacagggcaaagacgcccgcatcacgctggccgatttacaggcggcaggcggcaagttatcgaaagagctactgacccaacatggcgagccgggccaggcggtgaagcttgccgacctgctggcgcaaaaagcgaatgcgacggatgaaacgcttaccgatctgacacaagcgcagcatctactgtctacgctaacgccatcgttgaaaaccagcgctctggccgcactgagtaagacggcgcagcatgatgagaaaacgcccgcgctgagcgatgaggatcttgccagtctgagcgccttattcgccatgctgcccggacaacctgtcgcgacgcctgtcgccggagaaacgccggctgaaaatcacatcgccttgccgtcactgttacgcggcgacatgccatcggcgccgcaggaagagacacatacgctctcttttagcgagcatgaaaaagggaaaaccgaggcgtcgcttgcgcgcgccagcgacgatcgcgccacggggccagcactgacgccgctggtagtcgctgccgccgcgaccagcgcgaaagtggaggtggatagcccgcccgcgccagtaacgcatggcgcggcaatgccgacgctcagcagcgccacggcgcaaccgctacctgtcgcctcagccccggtactcagcgcgccgttaggcagccatgaatggcagcaaacgttcagtcagcaggtcatgttatttacgcgtcagggacagcaaagcgcgcagcttcgattgcatccggaagagttaggtcaggtgcatatttcgctcaagctggatgacaatcaggcgcagctccagatggtatcgccgcacagccatgtccgcgccgcgctggaagccgccctgcccatgttgcgcacccagttggcggaaagcggcattcagttgggacaaagcagtatcagtagcgaaagctttgccggacagcagcagtcttcgtcgcaacaacagtcttcccgcgcccaacacacggacgcgtttggcgctgaagatgacatagcgttagcggcgccggcctcgcttcaggccgccgcgcgcggcaatggcgcagtggatatcttcgcctaacgccagaggtagcatgattatccgcgtcttttccacgctttgtcgtggacaggacacgggataatcagccaataagcagtaccgaaacaggaagcccgtatcagatgactgactccgcgattaacaaaaagagcaaacgctcgatttggatacctttgctggtgttgattaccctcgccgcctgcgcgaccgccggttatagctactggcgtatgcagcagcaaccgaccacgaacgctaaagcggaaccggctccgccgcccgcgccggtattttttgcgctggatacgtttaccgtcaatctgggcgatgcggatcgcgtgttgtatatcggcgtgaccctgcgtctgaaagacgaagcgacgcgcgcgcgattaaatgaatatctgccggaagtgcgcagccgtctgctgttgttgttttcccgtcagaatgccgccgagctctcaacagaagctggcaaacaaaaactgattgccgccattaaagagacactggccgcgccgctcgttgccggacaaccaaaacaggtcgtcactgacgtgctttatacagcttttattctgcggtaacgatatgggcgatagtattctttctcaggctgaaatcgatgcgctgttgaacggcgacagcgacaccaaagacgaacccactcccggtatcgcaagcgatagcgatattcgcccttacgatcccaatacccagcgtcgcgtcgtgcgtgaacgcttgcaggcgctggagattattaacgagcgtttcgcacgccagttccggatgggattatttaacctgctgcgccgcagcccggatattaccgtgggtgccatacgtattcagccgtatcacgaatttgcgcgtaacctgccggtaccgaccaacctgaacctgatccacctgaagccgctacgcggcaccgggctggtggtgttctcgccgagtctggtgtttattgccgtcgataacctgttcggcggcgacggccgttttccgaccaaagtcgagggccgcgagtttacccatacggaacagcgtgtcatcaaccgtatgctgaaactggcgctggaaggctatagcgacgcatggaaagccattaatccgctggaagtggagtatgtgcgttccgaaatgcaggtgaaatttaccaatatcaccacctcgccgaacgatatcgtcgtcaatacgccgtttcatgtggagatcggcaatctgaccggtgaatttaacatctgtctgccatttagcatgatcgagccgctgcgtgagctgctggtgaatccgccgctggaaaactcgcgccatgaagatcagaactggcgtgataacctggtgcgccaggttcagcactctgaactggagctggtggccaattttgccgatattccgttacgtctttcccagattttgaagctgaaacccggcgatgtactgccgattgaaaaacccgaccgcattattgctcatgtggacggcgttccggtactcaccagccaatatggcaccgtaaacggacagtatgcgctacgcgtagaacatttgatcaacccaattttgaattcgctgaatgaggaacagcccaaatgagtgacatgaataatccgtccgatgagaatactggcgcattggatgatctgtgggctgacgcgttaaacgagcaaaaagcgaccaccactaaaagcgccgccgacgcggttttccaacagcttggcggcggcgatgtcagcggtgctatgcaggatatcgatctgattatggatatcccggtcaaactgaccgtagagctgggccgcacgcgaatgaccattaaagaactgctgcgtctgacgcaggggtcggtcgtcgcgctggacgggctggcgggcgagccgctggatatcctgattaatggctacctgattgcccagggtgaagtggtcgtcgtggcggataaatacggcgtacgtatcaccgatattattacgccatccgagcgtatgcgtcgtttgagtcgttaatgatgaagacagaagccacggtttctcagcccaccgcgccagccggatcgccgctcatgcaggtgagcggcgcattaattggcattattgcgctcattctggcggcggcctgggtgattaagcgtatgggattcgcgccaaaaggaaatagcgtccggggactgaaggtgtcagccagcgcctcgcttggcccgcgcgaacgcgtggtgattgtcgaggtcgaaaatgcgcgcctggtactgggcgtgaccgcctcgcagatcaacctgctgcacaccctgccgcccgcggagaatgacacggaagcacccgttgccccaccggcggatttccagaacatgatgaagagcttactcaagcgttccgggagatcctgatgcgccgtttgttattcctttctctggcgggtctgtggctttttagtcccgccgccgctgcgcaactgccggggcttatcagccaaccattagcgggcggaggccaaagctggtcattatccgtccagacgctggttttcatcacctcgctgacgtttctgccggcgattttactgatgatgacgagcttcacgcgtatcatcattgtttttggcctgttgcgtaacgcgctgggcacgccctcggcaccgccaaatcaggtgttactcgggctggcgttgtttttgaccttttttattatgtcgcccgtcattgacaagatttacgtggatgcttaccagccgtttagcgagcagaaaatttctatgcaggaagcgctggataaaggcgcgcaaccgttacgcgcgttcatgctgcgccaaacccgcgaagccgatctggcgctgtttgcccgtctggccaatagcggtccgttacagggaccggaagcagtaccgatgcgtatcctcctgcccgcttatgtcaccagcgaattaaagacggcgtttcagatcggttttacgattttcatcccttttttgattatcgacctggtgatcgccagcgtattgatggcgttggggatgatgatggtgccgccagcgacaatcgccctaccgtttaagctgatgctgtttgtgctggtcgatggttggcaattgcttatggggtcgctggcccaaagcttttacagttagaggcgcaaaatgactcctgaatccgtcatgatgatgggcaccgaggcgatgaaagtcgctctcgccctggctgcgccgctgttactcgtcgcgctgattaccggcctcattatcagcatcttgcaggccgcgactcagattaatgaaatgacgctgtcgtttatccctaaaatcgtcgcggtattcatcgcaattatcgttgccggcccgtggatgctcaacctgctgctggattacgtgcgcactctgttcagcaatttaccttatatcatcggataaacagaacgatgatccaggttacaagcgagcaatggctatactggctgcatctctatttctggcctttgctgcgcgtactggcgctgatttcaacggcgcccattctcagcgagcgcgctattcccaagcgggtaaaactggggttgggaataatgattacccttgttatcgcgccgtcgctaccggcaaacgatacgccgcttttttctattgccgccttatggctggcgatgcaacaaattctgatcggtattgcgctgggatttaccatgcaattcgcctttgcggcggtgcgtaccgcaggtgagtttatcggtctgcaaatggggctttcctttgccaccttcgtcgacccgggcagccacctgaatatgccggttctggcgcgtattatggatatgctcgccatgctactgtttctcacctttaatggccatttgtggcttatttcgctgctggtcgataccttccacaccctgcccatcggtagtaacccggtgaacagtaatgcatttatggcgctcgccagggccggagggctcattttcttaaacggactgatgctggcattgccggtcattaccctcctgcttacgctcaacctggcgctggggctattaaaccgcatggcgccgcagctctcgatatttgttatcggtttcccgcttaccctcaccgtcggcattatgctgatggccgcgctaatgccattaattgcgccgttttgcgaacatttattcagcgaaattttcaatttgcttgctgatattgttagcgagatgccgataaataataacccataatttttatcctgttttactaaggtttatccgaaaataaattttaaaaaacattcaccaggatatatccactgccccttatttgtttttacttcactcacataacgcaacattcactttactttaagatgattcctggcaaattatatgtaactttacgggatagtaagttcgcctgaaaaaccgcgtaagcgttgtctaaggtgactattcgtgttccgtctgattatggtgagttattcaggtaaggggaattatcgttacgcattgagtgagggtatgccatgtcaacgattattatggatttgtgcagttacacccggctagggttaagcgggtatctggtcagcagaggggtgaaaaaaagggaaatcaacgacatcgaaaccgttgacgaactcgctatcgcttgtggcgcgcatcagccttcggtggtgtttattaatgaggactgtttcattcatacgccttcagacagtcaacaaataaagcaaatcattaatcaacatcctgacacgttatttattgtttttatggcaattgctaatgtgcattttgatgaatatttattagtaagaaaaaacttattgattagctcgaaatcgattaaacctgactcgctggatacccttcttggcgatattctgaaaaaagagtcgggtatttcaggaaccataaatttaccaacattatcgttaagtcgaactgaatccagcatgttgcgaatgtggatggaaggtcagggaaccattcagatttctgacagaatgaatattaaagcaaaaacagtatcctcccataaggggaatataaaaagaaagataaaaacgcataataaacaagtgatctatcacgtagtacggctgacagataacgtcactaacggcatttttgttaacatgcgctgagacatccggactggcaatgtacctccagtccggctcaattagtcctgctccgccttctcgacaaaaataccatcctggtgacctgactcattgaagaaccagatgccgagcgggtaatcctccagcgaaaccaggtacattgtgccttcactaaattcttccactgccagtaccacgcccggtcggcggggaccgccgtccgttttaacggttacccgatcattcaccttcatcattttcctcctgtcgctttgtgccagtgtagaacaattttctgcgtctgacagcgccttgccggcgtgtttgctggttttctcaacggtctatacttaggctgtcaggaacccgtgaggtggtgaagatgaaaacggcaaaagagtacagtgatacggccaagcgcgaagtgagcgtcgatgtagatgcgctactggcggccatcaatgaaatcagcgaaagcgaggttcaccgtagccaggaagatcctgagcgggtgagcgtagacggacgggaatatcatacatggcatgaattagctgaagcattcgagctggatattcatgattttagtgtaacagaagtaaaccgttaaaaatggccgaaaaaaatcccggccctacgggtcgggatcaaacttgcttatgcaagaagcacttgaaaattcgttacaccaggaaatctgatgtgagatttaccttatctgcaatttttttgcatgacaagtaaatattttttacatgaatgattaagcacgctaatagttcggtagcaaaagtgtgacaacgcatgtgctgcctggaagcgacgggatcggttccagttagcgttcgacttctttcgggtgtgctttaggacttttcctggaaataagcccgccgttgcaacggaaaatgaggaaaaaatgctctcaatccatgaccccttgctgatttttaccgatctggacggcacattgctgaacagccacacttttgagtggcagcccgcggccccctggcttacacgcctgcatgaaagcggcgtgcccgtgatcctctgtagcagtaaaaccgcggctgaaatgctccagctccagacgacgttaaatctacagggactgccgctgattgcggaaaacggcgcagtgatccaactggacgttcattgggaagaccatcccaactatccccgtctgatagccggtatttctcacaacgaaatccgcctcgtcctgcataagttgcgtgaaaaggaacagtttaagttcaccacgtttgatgacgttgacgatcaggtgataagcgaatggacgggcctaaaccgggcacagtctgccctaacccgtctgcatgaagcgtcggtgtcgctgatctggcgcgatagcgatgaacgcatggcgcagtttgtcgcccgtttaaatgacctgggactgcaatttgtccatggcgcccgtttctggcatgtgctggacgcctccgccggtaaagatcaggctgccaattggctgattgaagcatatcgtcggcagtggcgcgcgcgtcctctgacgttggggctaggagacggccccaatgatgcgcccttactggatgtgatggattatgcggttgtcgttaaagggctaaaccgggagggcgtacatttgcgtaacgacgatcctcagcgcgtctaccgtagccagaacgaagggccggatggctggcgcgaaggaatggactatttcttttcccgctcctgagtcgcgtcgctggcgcaaatacggttacgtccggactgtttggcgtaataaagccgtttgtcggccagcgactgcaactgctcaaaatcatagtcgccgtattcctccgcgctactgatccccattgacgcgctgatacgaagcgtcgtgcttttcgtcaccagaatctctttgtcattaatgcgctggcgtatgcgttcggcaatctgcagcgcctgcgctttcgtcgcgccgggcagcacgatacaaaactcttcgccccctacccgtccggcgatgtcgtgcgctcgaatggtgctgccaatgagcccagcggcatgggacaacacgcgatcgcctgcctgatgaccaaagcgatcgttaacgcttttaaaataatctaaatccagctgtatcacagaaaatggctggcgggcttcccggtagcgctttgccagcctggacgctttttcaaacagcgcgccacggttatatagccgggtcagcggatcgtgccatgcctgccattgcagcgaattttgcagaacaaacatgtttttgaccatatgtcgaataacgccccaggagatcaacagcatcgccgtaaaaagcccccataacagcgtcagcgcgatactaatgctgccaaaattcccttgtatgccttcacgtaatgtatgcacgcgcagcaggatgccatcaaaatgatccagccgctcccagcttacataatgcgttcctaaacgcagcccgcccagggtatctttttctatttcacgcgccagtaaggcgcgctcacggtcatttaacgtattcgcggtttgttgttccggcgcggagtccgtcaacaaacggagatggttatcgtatagctgatattccccttcaatatccttttcggccgcatcgcgcaggaaccgctgtaatgacgcgacgggaatatccattgccagtacgccataccagtaattatcgtgatccagcggtagactggctgtcacttttttctgctcgtcagtaacatagggctgtgcggaggtaaaccaccgcacgccgcgctgtgagttacgccgttggctttgctcgataaaccatggctgagtcacgtactgatagtaacgggagacaatatcgctaccgtacgccgtagggagagttgagaggtaaaaccctgagcgagaaacatacatcgtctccagcgccagcatggctgatgagcgcgccagacgcgccagataccctaactccagcgtggcggttaattcatttgccaggtcacgactctcccgcgaaagaagcgtcgtccgggcgacaaattgatcggaaacgccatataacggcaatgtccgccgcttatccaactccaattgccagaaatgtctgacgcgtcgttgctcaaactgcgtcaccgcgctttgcaatgcggaaaaagccagcggcgccaccagcgcttcatgcataccgttgcgtaaaaagatcaacctgtccatgttgaattgcagttggcggtcaaggacattcgcgacgctccccagatgattgcgctgactggcgacatacgcgtctttcagtatcatcacttccctccaggtaagtagcgtcgagaacagcatcacgatcagaaaacaggtgttgacgacatgaccgggaccaaaacgccgcgccagctttttaaaccagccttgattgtctaacagtgtttcgtgcggcaccctggtaactcctggttattgatacaactccccctgatggcttacggtagccagacctcatcaagggataccactcaatcctggcataaccaggtagcagcatgtcgcagcgcgacgactctttttctccacagcaaaacgcccggcattaaccgggcgttttgtcatcgggcttcgtcccgcacgcgcctttccttgcctggcacgagctcattctcatggaatgcctcccgctttacgccaaaaccatcataccagcgacactctaccattccgctggaataaccggtgacgatcatccggggcccaccctctttcacggtaacttcctcactgacagaaaagaccatacctgcctcctgtatcagatgaaacgctttcaccttagacgaggatggacaattttgcataattcattgtagaaaatcagtgcgaaacaccgcgaattttcgccacacctttcaccagcgccaccacaatggcgccgataataaagccgagcaccagattcagccccgcagggatcgtatgcgccatgaaagccccctgctgctgcgcaaaatgttcaatggcatggtgtagcggcgcaataccgtgtacgacaattccgccgccaaccagaaacatcgccagcgtaccgacaatggataatgctttcattaaccagggcgcgataatcagtaatcctttaccgacgccctgcgccagcacgctacgcttttccgccagccagtaccccatatcatccagtttgacaataatacccaccaggccatacacgccaatggtcacaaccaacgcaatccccgccagtaccaacacctgattaagcagcggcgcctgcgcgacaatccccagggtaatggccacaatttcagcggacagaatgaaatcggtacggaccgccccttttactttatctttttcaaaggccaaagggttttgcgcagccagcgcctcaagacgtttttgccgctccgccgggtcttctttgtgttttcgcgcctcaaaggtatgcaggactttttctaccccttcaaagcagagaaacgcgccgcctaacattaataaaggcgtaatggcccacgggataaatgcgcttatcaacagcgccaacggcaccagaataaccttgttgattaatgatcctttcgccacgctccataccaccggcagctcgcgattagcgcgaacgccggtcacctgctgcgcattgagcgacaggtcatcccccagtacgcccgcggtttttttcgcggccaatttgcccattaccgaaatatcgtccagcagcgtggcgatatcgtcgagtaatgtcagtaagctacttcctgccaaaatgatttcctcggtcttttcttctaagacgttaagtatgtagcaaaacgcgcaatgccgaaaccggcggcgcgggtcaacgcctttttattccaaaaggacaattataatgctcgccagcataataattttgacgtttactatattcaccctttttatttcaccgtgagtgattatgcgtttccggcagttattacctctttttggcgcgctttttgccttgtacatcatttgggggtctacctattttgttatccgcataggcgttgaaagctggccgccgctgatgatggcaggcgtacgttttctctcggcggggatgttgctcatggcgtttttgctgttgcgcggcgaaaaacttccgccgctgcgccagaccatcaacgccgcgctgattggtctactgctgctggcggtgggtaacggtctggtgacggtggcggagcatcaaaacgtgccatcgggcattgctgccgtcgtggtcgccactgtcccgctatttacgctgtgctttagctacttttttggtattaaaacgcgcaaattagaatgggtggggattgccattggacttgccgggattattctgctgaacagcggcggcaacttaagcggcaatccgtggggcgcgattttgatcctgataggttcgatgagctgggcatttggttccgtttacggctcgcgcatcgccctgcctgtgggcatgatggcgggtgcgattgaaatgctggcggcgggcgtggtattgctttgcgcggcgtttctttccggcgagaagctcgccacgctgcctggtttatcggggtttatggccgtcggctacctggcgttgttcggttctattatcgccattaatgcctatatgtacctgattcgcaacgtcagtccggcgctggcgaccagctacgcctatgtgaatccggttgtcgccgtgttacttggcactggcctgggcggtgagaggttatcgcccgttgaatgggccgcgctgggtgtgattgtgtttgccgtagtgctggtgactctgggtaagtacctgtttcctgtcaaggcggtggtcacgccgtgtaaaacggaagattcacgccagtagatgaatcccctgggtgtcgatctgcgcgctggcgccgccgccgcagatccactcttccaggcgctccgccaacgccgcgtcgctcaatttcgctcgcccgcgcaaggcgcactcccagacgatcagtacccgccagccaagcgcctgtaaacgctgaatatcgcgctcatcgcgctcaacgttcttaccgattttttccagccagaaagccgttcgcgtggccggcactttgaacagataacagtggtgatgatgccaaaagcagccgtgagtaaaaatcacacaatcataatcattcaccacaaagtccggcttgcccggtaatgtcgcgtcctgagtatgaaacgtaatcccctgtgcgcttaacaggccagcaagacgtttttcaatagccgtatcgcgggtcgctatcgcgcgcatatttttactgcgcgtggctttatcgtgaacgtccgccatctaccgtctctctctgacgcaacgtcaccgcctggtgaattttgggttccaacagctttgctaccgcagcaaataccggcaccaccacggagttgccaaactggcgataggcctgcgtatccgagacaggtatcctgaactggtacgtttgcggcgcctcaaatcccattaaacgcgcgcactctctcggcgtgagtcggcggggacgatgttgttggttgccagcatcgtcgaaattcacttcgcctttcgccatatcccaaccacgatcgatcagaatttcggcaccatctttgtagtagcgagcagataacgtgcgcgccacactttccggattgtcaggataaaccatgccatagccaaaaccgtttccccgcgcctggtgctttttcgcgtagcgatataaatatttccacagcaccggcgtcaggatatatttggcttcgacgacgggctccagcagttctgccagcgtcggacggcgcggtggataacaacgggcgatattgcgtaacgtaaaatcggttttcaggtttaaatcgcgacggaatcccaccaacacaatacgttcccgatgctgaggaagaaagtgctgcccgtcgataattttcggatcgtccgggccattgtcagcggcatccgccacgtcatatcccagttcatcaagcgtttgcataataatgcggaaggtgttgccctggtcgtgacttttaaggtttttcacgttttccagcacaaacagcgcggggcggcgggcgtcgataattcttacgacatcaaaaaataacgtcccctgagtctcgcaggcaaagccgtgggcgcggcccagcgcatttttcttggaaacgcccgccagagaaaatggctgacagggaaagcccgccagcaggacatcatgttgcggaatatgctggcgaatgtgttccgccgcctcatcatcgctgaccccttcccggtggctcaatgtgatatcgcggatatcttcattaaagcgatgttgcagcggatcgcaaaaatagttcgctttatatgtccgtaccgcgtgcttattccattcgctggtaaacacgcactgtccgcctatcgcttcaaatccgcggcgaataccgccgatgcccgcgaagagatcgataaaacgaaaggcgtaatgtggatgatgcgctggcggcgtcggcaactctgttttaagacaggtgagttcattgtcgctcaagcgatgccatgccgcgttcatcattacgcgcttgaagatggccgggctccagtgctgttcgcccaggccgttaaggtgcgccaccagcgttttaacatcgtagatttccagcaattgactcagcatcgcctggagctcgcttccggcgtcgtcggcgatgaggttccgggcgtgtgttactgaaatattttcctgcatacatttaaccggccaaaaataattgccgacagactaacataaaatgacgcggtttacgtttcagcgacaggggttactgatgcgtagcaaacatctggatgaccgcatcatcccgtgtttcatagtcgcctttcagctcagcgctcagtttcgccatgtacgacaccagaaaatccgcattacgctgcgccaggtacttgccccgttcggtctgcatcgtcagcggcagtttcagcagtttggtttgaaaatggtcgagcgcgaattgcttatcgttaagaggccgtctgtcggcaaagggatcgtcggcatcaaataacgcgacgcccagcgcgccggagaccgcgaagacccgcgccagaccaatggcgcccaacgcctccagcctgtctgcatcctgcacgatttttgcctctggcgtggtaggcgcaatttttgcgctgaagctatgcgcttcgatagcatgacaaatgcccgccagtttttctgccggaaagtcaggaaaatcccgcagaaaaatacgccgggtttctgccgccgccagaatggaagaacgatgccgctgcggatgatttttcgccaggctgacgatgtcatggaaataacatgccgatagcaccaccagccagtcgacaggactgttttcccccagcgtttgcgcggttgcccaaacacgacgaaaatggaagatgtcatgggcggcatcctgttcctgatggtggtgacgtagccagtcttcaaactgcgattgccagtatcctgagtccatacgccctctctttatagcagaccatttttattacatgcctgagcacagggttcgctatcctgacatatccgccaccactttacatccctgcttacttgcgcgtttctggcttagtgtcggcgggataagccctgtttttgcgaggccgggtataccaggcaatactccccagaataagccagacgacgcccagcgaaagcgcgttaagccatttttccgttgcgctgccaggagtgctgattgggccgagaaccggctcggtttgtatggcggacatcagccacacgcaacgcgccatcgcccagatgaagtagccgcaaaaggtataaaaaacccataacgctaatttgccgcccatgctacgggtggcgttgtcctccctggtactcaaactttactccgcttttgtgatgtaagtcatatgacattaattacattataatgtgatattaatcacatttcgactatggaatacctcatccacctgttctggctattcattccacaaatagtttattctcagttaatgttacgtctggcgctgaacctgctgttaaataagggaatggtgattgaatcgcactctgatgcagaataacctataaccagaacaacttatttttacgcaccgcgatagcgttttattttatcagcattaagtgtcagaatgattcggttattagccttttatcatttattttatcattacccacattaccggcatttatgccggttttttttatgttttttcataatcaaagcatcaaatacatataaaaaacaaattatattcacaccaacaaccatcaaatcaaaaaacataacccattgataaaaaatgataattatagaatatatattcttagttacttatatagtctgtattataaaaaaccaaacagaaacaaattgaaatattttaaatacctttgttacatgttattttttaaattccatgaacttcatagaatagtatcaatttgtagttttgttgaagtggctacatattcatataaattattatcataagggaatacataatgaacagaaaagttctggcactgcttgtcccggcgttattagtggcaggcgcagcaaatgcggctgaagtttataataaaaatggcaacaaactcgacctgtacggcaaagttgatggtctgcgttacttctctgacaatgcaggcgacgacggcgaccagtcctacgcccgttttggctttaaaggcgaaacgcagattaacgatatgctgaccggctatggtcagtgggaatacaacattaaggtaaacaccaccgaaggcgaaggtgcaaactcctggactcgtctgggctttgccggtctgaaattcggcgagtacggctctttcgattatggccgtaactatggtgttatctacgacattgaagcctggaccgatgcgctgccggaattcggcggtgacacttatacccagaccgatgtctatatgctgggcagaaccaacggcgttgctacctaccgtaataccgacttcttcggtctggtggaaggcctgaacttcgcgttgcagtaccagggtaataatgaagatcctggcgcaggcgaaggaacagccaacggcagcgatgcagatagtggtactcgcaaactggcccgtgaaaacggcgacggtttcggtatgtctacctcctacgactttgacttcgggttaagcctgggtgcggcctactcttcctctgaccgtacggacaatcaggttgctagtgggcgtggtgatggccatcattactatggcaatagctatgccggcggtgaaactgccgaagcctggaccgtaggtgtcaaatatgacgcctataacgtatacctggcggccatgtacgctgaaacccgcaacatgacctattatggcggcggcgatggcggtgatggcggtatcgctaacaaaacccagaactttgaagtggttgcacagtatcagttcgatttcggtctgcgtccgtccatcgcctacttgcagtctaagggcaaagatttaggcggccaggatatggatagccgtggtaactatcgttacaccgacaaagatctggttaaatatgttgacgttggtatgacttactacttcaacaaaaatatgtccacctacgttgattataaaatcaacctgctggacgaagatgatgacttctacgcaaacaacggtattgcaaccgatgatatcgtaggtgttggtctggtctaccagttctaagacgctttatgttattcaagcccgtgcttagcgcgggcttgttattatagggtaagaattaaataacggataacggcgcaaagacaggttgacctggtttcatcggatagatgaagacaacatcgcttttttcaggcgctgtctgcaagagaaataacacttttggggaaaggaaaatgccactatagatgatggatgtcagcgtctatagatgataatcatccgggcataaaaaagctcctgtacggagctaatatgaattattttctaaaatctggcggaacctgccctgagcgaatgtataatccaacattatcaaaagtgatcatggttgacttacaaaaaatacatttcgcgccaaacgggttttgctcagtaacatcgaatgtcgatgttctgtattgtgaaccatggcaacatggacaccggaagtgaattttattagtaatatcagttgccttaaagcgccacaacgttgaccgctgatggaccttttggtccctgctctactgaaaactccacttcctgattttcattcagagtgcggaattcattactttgaatggctgaaaaatgcacaaacacatctttgctgccatctttaggcgtaatgaaaccaaagcccttttcagggttaaaccattttactaaaccagtgattttcgtcgtcataatattgttacctttcgaatgagcccttgggcaaaatggcctgaagaaaattatcagagagaaaaaaacctaaaggagatctcaagaggaacaaatgatgagaaatattacaatcactacttcagataagtttgtatcaaaccgcacaaccattaacgcatggttaactgaacatagcaagctttagttttgttaaaaaaatattaattgttttttagcattatcacgctgattgccatactctttttattcatgcctgtcgctacggctgaaacctggcgtaaataagtgacgtctcacaacgcctgccgggcaataaacgcgccacattttctgatgtcgtaaaccaggatacatgcgcctcatcgtgagaggttcctgtgatcttgtgcgaccaaaaccggttagagaacggggatgatttggcaaccatctcaggcattgatcgcacaagttacttaacacgcagtagatcagagtatcttgtggtgtaccgaggcgaaagcatttctcgcttcatagcccactgttgcgacatcccctgcccggcgaagtacagcgtccccttcccgtcttttgcgttaagatggtccagtacttccatcaacttcgcactaccggcgcgcggcgcgttatcgtcgaaaaggttgagttgcgctacgccctgactgaagaagtcacccagcatcacccccgctttctggtagcgatggccgtcgcgccatattttatccaggcatttcacagccgcattgataatgtcacgtgaatcctgcgtgggggtgagaagcgtcaccgcggcgctgttaccgtagtagggctcgttcagggcaaagggtgatgttttgacgaatgttgaaatgaaacggcagtactggtgctcgccgcggagtttttctgccgcgcgcgcagcgtagctgtaaacagcctggcgcatttcctcatagtctgtgacccgctcgccgaaagagcgactacaaacgatttcctgctttgccggcgcaaactcttcgagctccagacatggctctccgcgaagctctctcacggtacgctccagcacgacattgaagtgtttcctgatgatccaggtactttgttcagagagatcgagagcagtcttgatgcccagggcattgagcttcttactgatgcgcctgccgacaccccagacatcctccacgggtatcagggccagcagccgacgctggcgatcgatgttcgacaagtcaaccaccccgtcggtctggcgctgccactttttcgcagcatggttagccagcttggcaagggttttcgtctgggcaatgcctacaccgacagtcaggtgcgtgcgcttcaggaccgtcgctcttatctcgcgcccgaaatctgtcagatcccggcagtttcgtacccccgtcagatcacaaaaggcctcatcaatgctgtaaatttctacccgcggcaccatctcctcgagtgtggtcattacccggttcgacatatcagcgtaaagctcgtaattactgctgaagcaaacaacaccggatcgccggaagcgttctttctgtttgaagtatggctcacctggtgcgataccgagctgtttcgcctcggcgctacacgcgataacgcagccatcattgtttgataacaccaccaccggtcggccacataaatcaggacgaaagaccgtttcgcaggaggcgtaaaagctattaacatcgcagagcgcgaacataatcaactgaccgctttaatgataaaggtcaccaccccgaatatgtcgagcgtgtcttcactgccgacaggtataggtcgataggcgccgttcatggggattaactgcactgtcgggcgcaactgcaaccgttttacggtgaactctccttcaattgccgcaattacaatgtcaccgtggtcagcgttccgtgagctatccaccaccagcaggtcaccgtcgctgatgcctgcttcaatcattgaatcccccgaggctttgacaaaatatgttgagctgggatgagaaacgagcaactcattaagatcgatacgctgctcaatgtagtccgccgcggggctggggaatccacacggcactaagtaactgaaaaatgggagaggaataatttcgcgcaactctgtaggtctgaaaaattccataatccatacctcgaatactgtttttatatacagtagtgttatttgaacatgcgcgcaagataccggagtcgctacgactgtttaaatcttcgtcgcttcgtttgtaagtttctctctcagttcaaattatgggttttgtaaattttccggttgtattgtcatgtgcgcatatttaagccagcctggaggccagattttctgtacagcgtcgacagtcccgcagcgtaagttatcgccacgcgccagcgcgtttccctcacagcaattaatcttctgcccggcgcccatgtctacaggggaacatgtcgggcaacaggccgggtgcgacgatgaccgaggacgacggcgttaagtcgccgcgagtgacatcaatattaatccagatggggtacggcgaaagagcggggcagaaaaccaggagttgacttatgatcgaaaagtaaaaataacaccatccctggccccctcttctggcagaaaaagcataagatggcgatacgtttttcacgtaatattctaacagaatattctaagtgtattctaagtgtgagactgatcgctgaaagaagatgagctaagtgtttgaattgtggcggagagagggggatttgaacccccggtagagttgcccctactccggttttcgagaccgtcccaatattcttatttaacattaacttatctaataacacgagaaaaaagtagcatttttgtacgcagtattttcagaaagttagcctacttatcaaaatcattttctcaccatgatagactattttttaaacaaaaccatctcctttattgacttcccacaacaacatgcgccataacatcttcgtggcatctggtggtttccgtccttaatcagttatgggattcctacaggttcaccggatgccacaaccttccctcatgcttctagttagcgcggtaatcccgttttttaactcccttccggttagccgataacagaatccagtacagcccgtgtatcgacagccccacatcataaataatcgctacctgctgtcgcggtattcctgccccaatcagacgcccggcctgcgcccattgctcaggtgataactttggtcttcgcccgccaatctcccctgtccccctgcaatacaataaaaacatatcgtataagaagtataaaatacttattcaaaaatgtaattttaagccccccctaaccaagtaaaaactatcgtttcagatagctatggcacgaaaatacggtagcaaatcttcatacaaaaatcttccaatttattaaactaaggttaaaacccgatatcttatcaatctcaaatcatggtatgttatattaatagcgtaagggttgaaaaatgttttctcgagtcagaggttttctttcatgccagaactattctcatactgcaactccagctattactctgccttcatcaggtagtgcaaactttgccggagttgaatatcctttattgccattagatcagcacacccccctactttttcaatggtttgaacgaaacccaagcaggtttggggaaaaccagatcccaattattaatactcaacaaaacccctatctcaataatattatcaacgccgctataatagaaaaagagagaactatcggggttttagttgatgggaattttagtgctggacaaaagaaagcattagcaaagctggaaaaacaatatgaaaatataaaggttatctataattccgacctggattatagcatgtatgacaagaaactatcagatatttatttagaaaacatcgctaaaattgaagctcaaccagcaaatgtcagagatgaatatctgcttggtgagataaaaaagagtttaaatgaagttttaaagaacaatccagaggagtcccttgtttcgtcccatgataaacgcttgggacatgtacggtttgatttttacagaaatctttttttattaaaaggaagtaatgcttttctggaggcgggcaaacatggctgccatcacctgcaacctggaggtggctgcatatatcttgatgctgatatgttacttacaggtaaactcggcactttgtatttacctgatggtattgctgttcatgtaagtcgtaaaggtaatagcatgagtcttgaaaatgggattatcgccgttaaccgcagcgagcatccggcattgaaaaaaggacttgaaattatgcacagtaaaccttatggcgatccatacattgatggtgtctgcggtgggctaaggcattattttaattgttctatacggcacaattatgaagagttttgtaattttatagaatttaagcatgaacatatttttatggataccagcagtttgactatcagctcctggagataattatttgcaaacgtatgatataaacgcgagcaatgtttcggcaaagctaaacgtaaagaccatactgacgatttcgatcgatatcgtggatgtgacgcgcgtacctccattaaattggatgacctgcgtgccgtggtgaaaatcactcatccggttaactccgtggttaaggggtgagtatattttcaggtcagtacacaagagggggctatttgtaccggctgtcaggttgatggcacaacgacaggaaaaagaaaaggcgggtaataaacccgcctgaatatttagcgtggtatatccggccagtcaggcgcagatgtatccaccctgtttaccattacgctataaagttcccatgcttccagccgtttaatctcttcatctgtggcaatttttagttttactgcccgtgccagtggtgcgatggctgattcagcctcagcaaggcggcgaactttttcagcctccgcctttttacgcagctcttccggagaataaccccgttgaacgactttaccgtcctgatataaccacgtaccatcaccacggcaatcatcagggcagtcagcagcgtctatttccgcaacagacatattaaccggccacaacattgatacagaatatgtgtttcctcgttgcgggactggcttattaacaacaccccagataaccccctcatggtcgtacattatttttgcagtatcatcagaaaataatgactgacactcataccagtcctgtccatcgtccgactccagaaaatatgcacctatatttatttcagcctgagttttatccctgtttacgggcgcgtcaataagtctgaaatttttgatattctgatattttttcattataccgttcccccttgtacggtataccactgactcccgactcgtttttgcaaaggcgcataattaataccatcaatattttcgccctgataatctttccagacggaggtaactacatatccgggagtgttaggccaggaacctgcattgttccaggtagtcactgatgtgccagcccctaactgaacatctaagacgagattattattaatccaggtacttaaccagccatttccccatagcgaaccaaagatgtcgccgttattctgatagatagccccgcctgcacgaagcgtgttagcggtgatatctccattgaccgtaaagacaatcgaaccgtcaggatttcgctggctgtacagatgccatccctgatcgtcgtccagttcaataactgttggcctgtttgcgtcgccccataaattaaacgtggctgtcattgtcgaattattattgctcgtcagtgacagtttttttgcgttgcctgcgcgtacggcaccattagtgagaacatctactgacatgtgcagcccggaattgtcgatataaccaaccagagcattattggcataaatccccagaacgccgtcactgtgccacttaaaccctgtatcgttatctccgaatacaatcgaattaccacccagcgcattatcagtaccaatgcctaacggaccgtttagcctccctccattaactgacagtgcctcaacgtcaccggctgtgggtttcatcagactattaaacagtgtatatgtctgaccgctggttgagtttcccggctgaactgatgaatattcaggcgtactgtgcagcgtgacatttgcattaccggtgtaatcatattgcgcaattaaccagtacgcatactggccgatattaatataaatatcgtaggtgtcgcctgatgtattaacccatgcgacctcgttagcagcagaaggtgaacgcctccataatgtggcggttattccaacaggtgaaccattaccggcacgcaataccagttcgctgattgccgcctgttcaggtgaaccagcgttaaaccccgccccaccgtacagtttaatcaccgcagttgatgtagcctgcggcattacaaccgtggcgattttgaaccagcctgattcgccaagtgtaatggtggttgacgttaccgcaccgatggttctcgcaaattgttttttgtcaggaatatcgccgccgttctgcgatttttgcagggcccctgcagcgagatttatcgtttctcctaaaccgacgttctggagaaacagcggcttattcgggatgtccgcgccattctgatttttttcaagacgggttttaacctgttcatcgatcagcctgccaatggcggcgtgaagctgcgtatgttcgcctttactgagtggtatgccggcggcttcaataacagtacagacctcttcctggactgcatcccacatatcactgttgagatccgttgcgcggcggcccgtggcgggatcaccattcgtaaatccgttttttccctgaccaaatttatctttttgcgcggtgggcgtatcaattctgtgcattctcttttccttccggataagcaaaaacaacaaccgtatgtgacggacaaagcttatcaatcacacattcagcaacagtatcgccccacgttctgatcgcagagtcgcaggtgcttgtacaggtctgccagctgatgttcgcatcagccggaatattcacacgccagtagtaacgccagaattccccccattcaggatcgggtgtgctgtcgagattctgaaactgctcaatggtggcagcggtataccccaacgcatcaagctgttcccgataaaacctctcgtttataccgccagcaacatttgcctttgcatccagccgttgctggcgctgctgtaatgtctgaacgccttccggtgcacaggaatcaggcaggccatacagctgttcataacggtctatcagttctgtggttctggccggatcaatttcagccatcagttcatccgctctctgatgtacccggttcagcgacggcgccagcccttcaatcagtgggttttctccgtcccaggcaggcccttccggcagaaggtgataaagtaactgcgtatattcgtcctgtaatgccatagttatccgttctccccggtataggtggcccaggttatattccccaggacaggaagttcagtttttcccagcaccacatctgccgccggcacacgcagctgatgtgccacttccccggtcgccagacttatcgcctcgctgattcgcgaaacataaatttttccggacggcgcgccatcacgcagcatcagcgcatttagctccgcaataatggcagtacgaatttccggggtatctttggccagtgcgactgttaccggaatgcttttttcagtggcagcgaaaacaaagagtccgccgccagcaacaggtgccagcggcaaaatatggtcacgtacagccttaacgagatcgtcgccaggagccggattcaccgggttactggtagccaccatcacaccaacggtgccggtccccttataatggcggaatgtccacgcacgggttattcccgcgatttcctttgcccagatgacgtaatcaggatcagcgcccccctgtggtatccagtaatagcgttccatgacgcgcgcgcgccacgtttcaggctcctctgtatcagccccccccggtcagagtgtcagcgtaacctgtagaaggaataccagtaatcggcgtgccaaggcgtaacgccgtaccatcgtcagtattaccggcagttcccgccacatcagcaataaccggcacacgtaacaggccgccggaagctttcaccgtctgcagggtcgtgaatgtaacctgatcatcccgctgaatctgtgtacccgcggggatctccggcgttccggcaataccatcccagcgtgcaaatcccttcgcagatacggcatttttcctgggacaacgcttaatcctcgcgtgacggtaaagccagtcctcatcacacatatcaggcagcatattccgggccagataatcgatataaccatacagcgtatgtacggcagcagcctgtacccggctgtaaacctcggcatccatgcgacgtaacacaacatcctgctgaaaacgggtcagtaaatcgctgcgaatggtagcaatcaactgaggaagttcaggacgtgcaaattgactgtcagccattaagtttgctccatatatcatcgaatgtaatattgtgaattaccccgtcccgctgatatatcgtcacgccagctgccagggtatctgttcctgtgcgttcagatgtcacatcaatacgtgccgccacgccatcgtctgtcatccacgccagcgcctgctgcatgtattcgcgggcatcctgcggcgttttattggtgagtttgcggcgtttcagcaggtagaggcgggaaccgatgcggtcattctgaacagcaggccaggtgtccccccaccagccgtatggctgtggggtcctgtcatcccgctccgcccggcgccaggtaaaaagagaaatcaccactgcccgcgtcagaaagtcgagcgaagccgtggcatccttacggattccattaacataaaggatcatggtgtcagctcatgggttggccaggcttatcggttataccgccgccatcgccattttctttatgggtatgaccgttataggtcgtgcgcatttcagccatcgtttttccactgctgtcacagttgtccctgatatcgccagtggattcgatcggcatttcaaaacgtgctttagtggcattcgtgaaaataactggctttccgccgccatttaccactattccggctcgggttaatgtgaccgactgcccctgatcgtcatatagcgcgacttccccgcgcgccagccctttcagtctgaagcggcggtcagccacaaccacagccactccgtgcgaacggtcaccgccgggaaacaataccaccgcttctgcgccattctgtgctgcagaggtgaaaccgtaaggttcaagatgctccacattctcttttttttcaccggcaataagtttcagtccggcagtctggcattttctgacggtatcaatcgcggtaatgactgcgcgcgttatcatgttctgaagaggatggttagccatcagaaatctgcctcctcactgacttttttcttcgctttcggcctgaatggttcaggaagataggcatccgcaggccccacccggatttcggtcagggtgccgttattgtcctggctgtacgtcacttcggcgatcaccagcgtttcattgtcaaaaccgttcagcgggtcatacaccaccacggcctgattcggtttccacaattcgccattcccctgtctccatccctgtacggtataggtggtttccagcgttttcgccgcacgctgacgggcttcaaattcacagcgtgatttgcagctgtcagttgtggcagttcctgactgctgaatggtgtggggacgataccgcgtgacgcctgcatcaccagtactctgccggatagcagcaatggttgcctcgccgaaatcgtcatccgtaccaggacgctgccccgtaaccagataactggagaaacgctcacgaacactacgctcggtatcacaggaaagaatattttcgccaagtaccagtgccgtggctgctttcatactgcccggcctgccgagaaccagccgtccccgttcgtcgtcatatgccagcgcctgagcctgtccaagcagcctgttcagacagtccacaaccgtttcaccatgttccggctgagcctcaataacggcggctgccggcgcgcctgcatcaacaacgtccacaccgaatggccgggcaagtgcgctggcgatcaggaataaattttccccgttatgctgtgcaggcgacgcagaacagtcgataagatctgccgttttgctgcgcccgacaatgcccgtcataatggtctgcgcatcataacgtagcggtaacgcctcaacccagccggtaataactaaatcatcgccaatgagtacctcaacagagtcaccattttttactggcggtacgtcttctccaccaggccactgccgggtgatcgagacattaaagtcccgggcaatacggtcaatgcccgcacttatccgtactgacgtccatcctccccagtcacgcccgttgacgcgtaaaaaaaccgtattattcatcgtaccggaaccctcagcggctcaaccgggataaatcctggatggggaacgggattacgagtgaggatgtcagattcccgcccggcgtcgtcataccaggctgcagccagtaccagtgcaggcagaacatcatcaggcgttcgcaatgcagtacgttcaacctgtgccagtcgtgcagaaatatcgcgattgagatccgtccgcataacggaaatttgctggaaaagcacatcatcccggatacgcaactgctcctggtcaatcgcagcattgagcgcggtccggatagctttcagatcctcataattcggtggagagctgccattactgactgtctgtacaccatccagcgccgggtgcatgacagtgataatgtctgagtcacggcctgttcctgcaggctgatttacgccccggacaccaggtacatcacgcggctgcttcagtgttgtcacggcgtggacggctgtgctgatggctgttgtcctgatggcggctgcgatcatattgcgttgcattttctgtttcgcagcagatccggagtcagtgggccaggtgcctcgaggggaaagaccgggatcaagcgtgatacctgacatcgtttttatcatcgtgaccagatccgatgtactgcccctgagcctgtcacctgagcgccaggctttttgcagtgcgttaacgaaatcacttgcggcgcccggtggcatcagaatgacagacaaatccccctgtaacagccgcattgcggcagacacgccggagtcaaccatcctgaaagcatcggcaacatcgcccagcatggaggctgcatcggcaatgacatcgttctggataaaatcagaaatacctgacaacgagaatgtggaaaacatactgtcaatcgcatcgtcgaaaagcccgcctgacgtttccaggcgcttcgccgttgccattcctgccaccggaaaagaaagttccccactttccacaaactgaaaggagacacgacacatgcgcccttctgtactgctgtgagtgatcctgacctgtccgtcaatgctgccctgcatttcgccatactgcggatggaccagcgtaccagggcctgcggtttcaatggcaccaataagacgatcccgcctgtctgcgtaatcatcaccgacaagataagcatttatcgtcaggcggcgcgtggcgcgacctaaatcctccgtccagggcttatccctgttcggatattcatgtacctgtacgcggcgtccaaaggtgctttcatcatcttcaacggagaaaggcactccacgaaatgatgcatcacgcaggcgcccgcgccagccagttgaggagaaaaaagccatatttaccccataagaaaacctgccggagcaggtttatcgtgatgtacgaaagggtgagtaacccacatcatggctgatgttcatcaatggattaccggatttcggtatatcagtcacacgcataccttgtggtgcattctcaaatgtcactttgagttcgctgcgctgcgttgatggcgggacagctcgctcgagtacgccagaacgccgggtcagtggcacataaggttgataacgcccctgcggaatcggggtgtccataccaagaagctctttgagtctgggaataaaaccgttatacccgcgttcacgctccttcgtttgcagcttctgtacagcgaatgcgccagcatccatacccgcatcctttgccccctgctccagatccttaagctctttaaagagtgacaccgccacgccaattgtcagcgtcatggcccccatccggccaattttacccagcagaccggaaagccgtccggccagcaggacggactgctgcagggcaccaatggtcctgacggtaaaagaaccagccataaccagaccaaccccttcaatcaccgtctcccatccgcccatctcctgcgcaacgttatcgacctcctgccataccgccttaatcaccggagcaacatcgtcccagttctcaatgatcagcatagcgccggccaccagcgccgcaatggcgactttcgccggagagagattaatgacactgttcaggattttgacagcccgggacaggctgccaatggatacgccaacagccagcagcgccgcgccgaacttcgccgcagactgaaccagttcaggattcgcgcgaacgaatgtccggagctgctccaggtaaggcatgaccgcttctgcagcttcgttaatggcgggcaggaaggtatcgcccagcgttaccgaaatcgcattgacgctgtttttcagcagaaccagctggttttctgttgtggccgcgcgggatgcgtattccttctgcatcgagccgccatattcctgggcatcagccacacgatcaaaattggtgcgtaacaaatccaggttggtcagcagcggggcaatcgcgctaagtgactccttgccaaacagcgcattcatgacggcggcctgtttagcttttggcactttcgcgagcgagtccagcaccttcagcatggccccgcgcgaatccttttgcatatcctcagcgagtttccggggattcagcttcaggaaagccatagcctgtttctgggctttggttgccgaattacctgcggttaacgacagcatgaagtttttgatgccggtggaggctatctccgattcaacccccatcccggcaatggtggcgcccatcgcggcaatttcgccggatgccactccggcaacaccgccaagcggaccaatccgcgtcacgatatcagaaattttcttcgcatttgccgggccggtattccccagatagttgattttatcggccaggacaaccacgtcttcctgcgtcagtctgaacgctgtccgccactgcgccatcatctgaccggactcttcggcagtggtatcaaacgccacacccattttcactgcgtcgttcgcaaactgcatcaaatcgccgcgggcaatgcctgcctgcccgcccgccgccacgatctctgcaattccctccgccgccatcggtaactgtgtggacagcgtcaggatatcgtcactcatctgcgcgaatgcttttttatcatccaggccgtcaaccaccttccggatgtcagccatttttgactcaaagccgatcgcagcattcacgggcagcgccagcgccccaagaacagcggtcccggcagcagcagcaccgatcgccagcccggccatttctttctgaaatcccttcagttcccgctgcatccctttcagcggacccgataactggtcaacggcagtgataatggcctttaactggaaactgtcagccatgcttcatttcctcattgatacggacagcctccaactccagctccagaaaatcggatatcgccgcccgccggagctccagggggtttattcgccagaagtatgcggtgttgtagacccgctttctgagtcctcctccgtctccgaccgggtaaaaaaattgaggatcaacatacaggctttgaaaatatccagttttgccagttgcgctgccgaggagcgtggaatacctgccagcacagggatatatttcagcgcaaccgaactgtccagccggacgccgccgtcaccggaaacggtgaacggaaaaccaatggcttcgatttcatcgtaggacggttcgcgcagctccagcacatgaagcttttcgttatgcgccataatcggctttttgagcacaagttcttttatcactggtaaaatccctcctcaccgtggaactcaagatccacggtgccctcttccgggttatggttggcttcgccgtgcagccaggcgtttgagagaacatacacctgaccatttgccagctctgatgtgatggtcataacatcagaagacgtaattttatcgaccgggaagtttttcggcactttggcggtcaccttcgtatacggtgcccggctggtttccttgtagtcaacggaaccatccaggccaatcacgtcgtcacgaactttggtgttcatggggacttcaatccctccggttaccgacagttgctgtccatcgattttgaaatacgttgttcccgcaatttttcccattatgcagcctcctcgctatactgcagacggaactggttaagcactgcaaacacacgtaactgattgacataatcaggcggaaacagcacatccaggcggttcgaatcgttcgcgttacgctccactatcagatgttgctggaacagatcgaagttttccacgatgccttcccgctccatctggcgatatgttgatcccagctcaccacggataacggcaggcgtgacaatggcctgaccagacccgaaacgcgtaccatcattagcaagtttatggcgcccgtatttactggtaataacagatttcagacggcgcaacacataagcactggtatgcagcgtctcgctgtcaaggtagctgttatccgccacaccatacgcatttttcctgtacgtcgtgatatcccgctgaatacgcagcacgccgctttccacatacgccgttgccacaccgtgggaaagtaacgtctgctgttcagtcgtcgtgaaacgtttgcctttcggtgccggcagcatgtccaccagctccccggtctgggtcgggcgcgccggatcgttacggataaaaaccgcagcacgggcagtacggcttgcagccagttcatcagcaggcgtctgggtgtctttctcatagcccgccagggtgatgtgctgcaggttaaactggtcacccgcggccacaagctccgacagagtccccgtcttcgccgtataaacgtgaccatacaactgccggacataactccagcgaccgctggaatcattcatttcagttgccatcgagttcaccgatgccgtgtcgttaaacggaaggccgatataatcgaacggctcatctcccatcgctgccaccgcgtcgttaagagctggcgcaccagcccccttcacgccgctggcaaccgtaatattcacacccgccggtaacacctccccaccgccaaagccgtaataattgagagtgaccggaatttcatttccatataaccccttgtggcgcgcagtcagtgtcaccacccccgcttctgatgttgccgtaaagggaagatcagggtttgcattgaccgcatccttaatgctcacagccaccgccgcagcgtcatcaccgctggtcacgggagcctgaacgcgggttcggccggtatagacattcaccgttccggtttccgtcgcttcgccagttaccgtcaaagcgacggttgctgccgcgcctgtggattcaggtacggcaatgacatacagttcgccaaatggatcggtcttacggtacgccccgaccatacgggccagctggcttccggcaccgcaaatctgacgggcataatcaaccgatgacaccagaacaagactgttgacggcaattgacgcatcattgctggcgtgaccaatcagcagtgatgccccgctgtcccgggcggtatttgccgccgagttatccatctcggcataaaacagcggaacccgtgtatctgacgggatggaattaaaactaatcgccatttgttttcacctttttattcgtgcgccggacatcaccagcggcctcgcggcgcagccagtagttattctcatcaacatttcgacctccttcaggtaaaaggtcgccacgggccggatcgggaaccgatcgcccttttgcgggtttcacaaacatggtttattcctgaaatgtaatttcggtgtggtgctcgatgtcgccatctggcccggtaccgggttcgataaaatcaacatcaatactgagcgttttaagatcgggcaggccgtccagatcatcctgctggcgggtgtctgtttcggtaatttcatacttcaccgtgaagtcgaactggtaatacagttcgtggcggttcagatcgagaagcatcccacccgcatactgaatttcatgcacctgcgaatccggctcccaccccagcagcgccttccagatttcctgcctgacgtcgtgaactgcgtcgtaagaagcccactgccctttttcatcccgttcgttgctgagtaccacgatgacggaaaaaccctccgtcaaatcctgccagtagtcggtctgcgatttctgctcacccgtgacgtcttcggctggcacaacatacgcggctggtagtctgagctttccggcctccggtatcgctttaaactgcgctgcgccacccacacggttttcaaaccgagggcaacggctgcgaagtgccgcaataatcggggttaatttcattttttcttccttcgctgaggacggagtgattttcgcaattcgcgggagagcacataacgtgtccagctgcggcgtttatccagaacctcagtcatgtagttgttacgtggttccacacgccagccgctgccgcctgatgcgccgcgatgatggcctttcttacgtttcgccccacggcgaacaccgtagaacagaaaggcggggtaaaaggcaccgttgatatgccggttgccctcgccgtttttctggttaggcgcgatcttcaccatgagccccggacgtttttttgacgcacggggtacgtagtagccgatagaacgcgccagctggccggtgcggtacgaggggttttcgcctggcttcgagcggccacgtttcatgaccagtcgccgcgcatcacgcatgtgcacctgaccaattttgacgaacgcccgtcgcattctcgcccggttaaacaccagttcttccggctgtacgaaatcaacgtgtaaatatgctttctgcggcatagtcactcccgttatcggtacccagcgcttcgcactcgatcaacagaaagcggcgtttaccgttcagatcacggacccgtttaacccgataagaaatatcgtcgtggagcacttcatgatcggcggtgataccgcggcgaaaacggatggtgaaatagtgcgtcaccctgttttctatctgcacagacccctgataagctgccgcaccgggttgcgcttttttggcccacgtccggatctgctccgggtacgtcggcgttacgccaaagtcatcagccggaacatcgacacgccgccggataacaatgcgctggtcaagttcgcccgggtcgggcaaaaggtatgtggcgctggtctgcgcctgacgaattttcattgtggaaagtacctgtatggaccgacaagccagccaaagctctgtggcatgtcgagtttttccacttccgtgacggaagatcggttttcgtagaaatgactgataagcatcaacatccccagacggatatcatcctgcaggagcagtccgtcaggatcgctgtccggaatggtttcatccggcgcatagagcttccggttcagatacgtctccgtccgcttttgtaccgctctggccagcagttgcaggtaacgctcatcggcttcaaaatcctcatccagccggagttgagctttaatttcttccacgctcagaagcatactcagccctcttgactggtcgtggattttttctctttcaccgctttattgctttttgcactggtttcgcactctgctaacccggtctgaagcgcaatctcctgcacccgggccgggagtatcctgtcgtcgtgttcaccggcacgaatgatttcaacacgcagaccgtctggcgaccatttgagatcttgtttcaggatcatgattccctcacctgtcagaacaggggcgccgttcagcgccccaccagtgattacgccgcagcgattttcagcagcttgatagcctgtgaatcgaccagcatacccccggtgcgcttggtggtataaaaaccgacaaacggtttgttggtgtacgggtcgcgcaggatgcgggtgccgatacggtcaacgatggtgtaaccccgtttgaagttaccaaacgcaatggctttcgcatcggcggcgatatccggcatctgttcgttttcagcgataccgtaacccgccagtgaggatggctgtcccagttccagccccggacgccacagatagttaccctcggtatctttcagcagacggatggcaaacaggctgttgttgttcatcatgaacttcgcgccggtacgatgcgccttacgcagcgtgtaaatcagcttaatgatggcatcagcggtcaccgcggtcgcttcaccggatacgatgtgctgaagtttaccgaacgcacgagccttatcggactcttcggtggattcataggccaggaaccctttcggcttcttggtgccgtcaccagtggtaaaggcaatttcctcctgttcggcaaattcggtcgccagttcactgttgatccaggcttccacgttgaagaaggcatcatccagcattttctgggtggcctgcgggttgccgtagatttcccccatgaaaggctcaatcagtcccagcctggaagtagcggtctgggaacgcgtgtcagtttcgccgacccatccggaagccgtaccacccagattcaccagttttttatagtcggaaccgcccacggtgatcaccgtggcctcctggcgcatcaccacctcatctttcagcaggctgagaatgctgcgatccagctcttccggcacggcataaccaccatcttcatcagtgcccacctgcaacgccttacgctccagatcgcgcagaccgtcttcgcggcctttacgcagaaagccgacgaaagcgtctttatgttctgcagccaccttgttttgcgctccacgtgccggacgtttcagctcaagcagctctttttcaaggtcgcttttgagattttccagctcgctgagtttcccgttcagggtttccacctgcccggcaagcttgcccttttcctgctcaatcgcctcaacgcgcttgtcgttctttgctttgaagtcgtcaaacttctgttgcagttcctgcgcgacctgttccacatctttaatatcaaccgccatcgtatttctcctgattagaagttcagatttttcagtacattcagtgcagagcccacatcctcagcgtcgcgcagggacagtgcgccatagcccccggccatgaatgctttggcctgggtacgggagagtccgacatcacgcaggactctttcgatttttttctgttcggggatttccccgcgggccagcgcgttcttgacgtcgctgatccgtgcctcatcgtttgacgggaacgtcaccagactgacttcccagaggtcgatttctttcagcagaaaggcttctttgctccggtcgtattcccagtctttcagtacgtacccaatagaaaggccggttaacgaaccggccttcatgtgtgcatgtgcacgttttgccaggggatcatcatcaatgagcaatcgccccttaacgtaaagcccgacatcgtcttccttcatttcggtgtaaacaccgatgggctcatccatgcggtgctgccagagcagcgcaggtaacgcttttctgtcactccactcccgcagggaagcagcaaatgccccggacatcaccacatcatcgtggctgtcctttacaccaaagacggagccatacccttcaaactcaccggagtcacttacagatttaagactcagcggtacatcaagacgttgtttcgtctgcattggcgttatccttctgcttaccggctttactgccatcggagggtttcgtggtcatgttcatcggtgtgagatagacatcaccaccgggacgcggattcatatcttccaggtcgcggcagtcattgggagagtaaatcccccagttgatcccggtggcataggcttcaaaacgggacttcatatccccacgcagtaacgcccccgcgttaaatttggcgtaaaaaacgccctgcttactttttcgtaccagtccggtgttgatccgctgttcgatgcgggtcagatacggcaccagtgaatagttgataaatcccagccccagctcttcaatattgttgaaggtggcgcgatcggtgttctgcaccatgtgcaatggcacccggaacagacgacagatttcttcaagctgaaacttgcgggtttccaggaactggctgtcctcggcgttcagcgccatcgacttccagtccagccccatctcaaggatcatcgggcggtgagcattaccaagcccggtgtgacgctcctcaaaatctttcttcaggcgctcataagcctgatccgacagcgtctgctctgtacgcaacacacccgacgtcaccgcgccattgctgaacagtctggccccgtgctcttcggtcgctgccgccagcgatattgcctcgcgggcataggcgatgggattcagccccaccagtccgtccagcgtcagcgtgcgcacatgccagatatcctcctggctcagtacatccgtggagccatccgggaatgtgacctgatagaccggctcccagctactgttaagcttcggcaccacgcaaccgggatcgacgggcagcagttcagccacttcgccaaatgctttcactttgtaggcataaaagttgccccgcaggcacagacaggtgaccaccagctcccagaactcctgcggcgtcatatagccattgggatgcgtggagatcagcttatgcagacgttcgccagtggctctctgtttcaggctgccgttcaggtgatacaggttgcagggcaacatcccgaccgactctgccagcactctgacgcaggaaaaaaccgccgtcagtcgcatggcccgctgactgctgatctgctttccggtataggtgtcgtatgacagcccgatagcatccgccagctctgctggcgtggtcaccggcgcgtcactttttcgttgaaataatcccgaaaagaacactatttacctccgccgacagactgctgtgtacggtcgagatatcgcgccaccagccacgaccagaacatgcacagcgccccggcaacaacaaaacccgccgggggataaatcagccaggcaccatacgccagcaaaagcgcacccagcacgcccaccagaggcgcgagaatcagcatgatcataattacctcagttaaagcgagcggatcccgtaggactcaatgtggtcagacagcgtgtcttctttctcgtacagcatggctctgccaaccgccataatcagtgcaactgcaccatcgattttattttccgcctgctccttaataggcttcaccacgtcatcgttacccggaatggttttgccgaccacgttgccgatacaccaggtcatgatgggattgccgtcatgatgaaagcgacccgattcaatcgccgcttccagttctttcatcggatcggacatgttggtgtaattctggatgatagtgacgggattcaggttttcatcagctagatcatgtgaaagcccggtggcaccaaatggatcaatgggggattcgctgaccgggttcagtttgttcgcagctttggcctcttcaaggatgtagcggtaatccacctccgcaccatcagttactgtcaaaaagcccatttcaacccatttctgaaaacgttccgcagtacggcgatcctcatttttctcaacactgtagaccgtgtcatacggcacccagaaacgtggcgccacgctgtaaaaatgcgttttcccgtctatttcacgggtaaataacctcgccatgctgttcatgtccagcttacgagccagatcgaacgccagtacgcagggttgaccctcaaacagttccagcgtcagcgtcttatcctcacagttttgccaggaaaccagattaaagaatgctgtgcgggcggcaacccatacattgagatgcttcgttttgaacacacccgcatggcgggcattgttaatagcacgctgttgctgactgagaaggaagtcacggtatactgacaccccaatgttcgggtttgctttctccagcacttttggatctgtccagtcatccccttcatcaaccgtgtaaatcacgccaaaaagttcgttgttcggcaccgatccgttcagcatctcaatcacttcgcgtcgcttgtcgtaacacggcccctcgatgttgtagcccgccgtggttattgcccacatcagcggctgtcggcgcgcgcccatacctgtaagcattgttgtgtagagcgcatccgtagggtgttcgtggtattcgtcaactattgcgcagtgcggtgatgccccgtccccggggttgccgatcaacggctcgaagcgggcaccatcctccggacggttcaggtttgaggcattcacctctataccgaatgcctccaccagtagtggtgtgcgcttacacatcagacgcgcgggacgaaatacctcccacgcctgtttttcagtcgtggcgccggagtatacttccgcaccgaattcgttatcacaggtgaaacagtagagagctacaccagctgaaatagccgatttcccgttcttacgtggtatctctgtgtagacctcacgaaaacgacgaagctttgttcccttctgtacccagccaaaggcacagcacacgatgaaaagttgccacggttccagggtaatcagcatacgtttgaacgcccattcaccttttgtatgtggaagtaactgaataaactttgcagctttctcagccatgtctttatcaaagcggtaccgaaaccttttactcttctccgccgccatatcatcaatgtgacgctggcaggcctgaatgacatactgacatgccgtgatttttccccgcacaacgttgcgggcatactgattagcggcgttaacgttgggatatgatttccggctcatgagttgatcatcttcaggaatgggttagatgttttcttctgtccggccagaccaataaggcgctgtcgactactggggtcaaggcccagcatagaaccagtagaactcatctccgattcctgttctttcttggcagtaagttcagggttctttattttcccccccatagcgccagttatggtgttaccttcttttgcgatattttttactgctctccgccagaactcgtaggcgacacaccagcgctccagtacagccaaatccgtaacacacagcagtccctgaccacacaattctttggtggtcagttcccacataactgatgccagaggcatatcttcttcgttaaaccagtccggaggagaaaccccatttattggtgtgaatactggttcttctttattcagggctcgctttccggggttcccggccagctccttgcgcgccgtaggcttggggcgacgcccggaacgccccgccgttccagccatatgcggcactcctggttaaatttcatttttcgcgggtataaaaattcgagggggcgggcagtccggaagacgtcaggtcacagggatttgacccgccccttccctcagacagttgagaattattatcacttcagacgctcacgggctgtcttagccttatggcatggccagcacagactttgcagattactgtctgtatccgtgccgccatgcgctttgggaataatatggtcgacagttttcgcctcacgtaccacaccggaacgcaggcacaactgacataaacctttatcacgcttcagtacacgcgcacggataacgtcccacttcgtaccataaccgcgctgatggcgggattgtcctggcttgtattgtttccagccctcgcttctgtgactttcacaatatccggatggatctgttgttgtactgcgacagccgcgaacacggcaggctttaggtgttcgtggtggcatataaactccagtaaaaagccccgcgagtgcgaggctaataatttgtttaaattctcagtgtcagtctaacttaatgagttttacaggcttctcacccgcttcggcacaccagttgttatattcgtgcacggctctcatcaattcactatcatagtgactgaccttctctacaaggtcagtaagagattgtgggtcaaactcaacgagttctggtgggacgcgattaatatcccctttctgatgaagggagtaaacggatgatcgtaaatcccctatagctttcatccgctcagcatgaagcgcttttattttttcgttgagtattttgcagcgcccaattgcttcgtagtttagttcagacattccggcctcctgttttcaggggttacattttaaccgatagctacagcatcatcgcagacactcagggaacgcctgctgtaatgtactaactggattaaccggctgtaatcacaccatgccgggtaaatacatttgcacttcattcactactcgctcacgagcaacgtgaagcaatcttttccgcccaccaacgccccacttagccatttgacttgcgcactagcttatcgctttggtttccgtgttgatgatgtgatcgattctattcagacgagacatggcaccaacgccgagacggacaaccgttttgaaaacttcataaacttcgatttcaaattccggcttaatccatgctgcatatctgattgccagtagttcaacaccccacacaccagaatcaaccccaccctttattactttaagtggttgaatttctttcaaagctcttttttgagctttggcttttagtgctgaaatgaaccgtttaatctgtgcactcctcagaaaattactggggcgttgagattcagttgcctcgccatttgcaactgctgctgcatgaagatcgtttaagttgtagcgtccgtcctcatcaacacgaacggacacaccattgacaataactgttgggtacttcatcagtgatcaccttttagtgatgaaccttgtcacacaggattccggcccacagaaaggcaccgatcaccaaaccggcatcctcaagggtcatcctgaaaggttctgtgttcagaagtcgcgcgtgtgaagcgcatttactgcggatataaaaacgccccgcattacgaggcattttcatgaaagtcacttgtcaaatttctatgtgatggaaattatttcaggcactgtgttctgatatagtcctgcgccccttccagttgcttttgcattgttgtcactcgctctttgagggtgaaataatcccgttgagcggagtctgccagtctggggcgggctgcattatccacgcgggcggcggaggtggatttacctgtcgacactgcgggacaggtggcgttgacgagcaggcgacgacggccagcggcgacatcatcgcgcaaagcatcattctcagctttcgcatcagcgagctcctttgtatatcttgcatcaagggcggcaacgtcacgctggcgcacctccatatcgctgatagtctcgttcgccagcgtcagactatgactggcggtatcacgctgcgatttatactgaatggcgttgtcgcggtaatggtctgttgtccatgcaagtacagcaatcagcaaagtcactgagagttgcaaccagtattttttcagcaatacaggtaacagattcataccagcaccgattttgctttttcaaagcgctctcgcctgtcaccgatgccgttctgccctccgttaatgatctgcgtaacgcgcaccaggtcgccggagtatttcagacaccctctagtcacaaaaaaccacgctgcggaacgggcggcatgacgatccagttcaagctgtcccggattcgccaccagatccagtttcagggcaacgccgcatctggtgtaattctccagcccggtaatctggataagcccacgcccgcgatacttccagccatctccggcgtctttgttacccatgcggccaccgtaaactagattggctatttgcggctggtgggccacctgcttaccatcgacacgccccagcatttcacactgatacggcgtcaggcgtttaccaaaggttttcatcagcccatctaccgagtagttgaagctctcgaccagcgaggtaaaaccagcagattcatgcccaacttgtgcaatgaacatggcctgatccagtggtgcagtaataccgaattcgctcattgccgccgtaatatgcggataccagcgcgcagaaagcccggcgctaataccagccgcctgctgaaattgggattcattcatgattaaacctgtggggggttaccaccgccaaagcggttactgaaatacgttgaaatgatggtgctgattttcttcacgccgataaatccgatagtgccgccaatggctattgtcagacttttcggcacatcaaaataatccagcgcagaaaccgccgtcagggtcagggaaccacacagcaacccttcaaacagcgtttctttccagctgctgccgttatagaccatgcggaaaaacgcaacaacgattgccataacaacgccgccaatgggtacgtctccccgccaccagctttgaaaaagttcgatccaactgtcccacgaatggggatcaaagtgcattttcatgacctccccctgtccgggagactgtttacccgggtatcgggtgagtggaaaaagaaaaggccgccaaacagcagcctgtgaatggttgccgcgcggtggcggcgttttccccggtttgatattgttgattcgccaaaaacacaacgttaaacggggtaaaaatgagtaattactcagaccttttccaaatcatcaagatcagagtttgccagaacaatgatttcccaacttattcactggcaggaaccaataactaccgcgccagccaggtatggtatcgaatcggacagatattcacccttgaatgcgtcctcgctgaatacagaagatgctgctcatcagattattacctgctggacaacgaaaaggcacttcaccaccttatttttcaaatcacaaagtggaaattggaggatatcagaggattatctcttaatgacagtctgtttattatttcagacaggctaaaacctgattacatgccagcagaagctgcgcaatttctccgctcgctgaaactgccagtcaatcattattctgttgacgatttctcggaagcggactgggatcccagagaaaactcagttttcctttaaaaccaccagcagacattcgttcaatttctgctgaaatctcatttagccgttcctcaagggcggctttttcatttaccagttgattatagtaggtcaggtgaagtttttgctgccctaaccagtcttcaagttgttcgggcgtcatgccagggttaaaaaaataaggctgctgtttaccatcttgcattacaggctcccagaaacgcaaaaaccccgcaaaggcgaggtttcgtaattttaattgacttgcttttcgtcgctgccatcgcggcgcagctttgccaagcatggctgaatcatagactttttttacctgttttcaagatattttttcattttgctttctcattgcatccctgaatgcgagaaatacagcacaattaaagtgattcacacaccatcgcacacggtcttcggcttgttttctggtcaaccacggcgctatctcctgaagatatcgtccgatgtcactcactcgcttacgacgcgcataaaaatcaataccgacgacaaataccggatcgtctttactcagcgccgaaaggatgcacctttcaacaaagtcgctttcttcgatgcgcatttctttattcagcagatcggctatagactgcttcggccacaatatctggcgggccatagacaaaagcgcttcgcctttatatccgatctttctcagccccttgattgtttccgtgatgcgttttgcttcattatccgtccattcttcatcctgcaggcaactccagaacccacagcaatcaagcatggcctcttctgacgttctccctccgtaacattccccccagacagacagtaatgatttaacccacgcactctggactgacgtaagcggcctgaattttcccagccagctcttgcgcggcgcggcagcggctttttctattgcgttacgatgttgacggcgttgacgtggtgtcattccttaccccttaactcagtacaccaatcgccagtgcgcgatcgataaaacgaaatatcaactccagttgagagccgtatttctcttcgaatgccacggtgtccgcatgtaactcattgtgatgcgttctgcacaacggcagcacaaagaggtcatgcgcctttgttcccatccctccctgaccgtggcctatcaggtggtgcggatcatccgcctgcttcccgcagcaggcgcacggctgggatttaacccagcgggtatatctctcattgacccatcgacggcgtttcggacgtaacatgaagctttccggcgattccggatcaaccctgagcgccagtacctttttcgccttatcctgtacaatgctggtggccagcaccgagggaacaatttcactttcacgggtagctgactggacaattgccttcggcatccttaatgcttttctcgcagcgctctccggtaagacttctgccaggttattgcgtaccatccaccagcacagttccgggagagtaactgcgtgcatatcgtcaaaacccagatcacgacaaacaaccgataaaacccattttgtcgtgttctccacagctattgatttcagccgttccgtaaactgttcgcgcagcaggttatcgcagtgccagcacagtcggattgcccccggagcgtggcgcatggttgtcatctgttcgctgtgccagtctgaatgcggccactgacagccattcccccggagtagccagctttccagactatccagaccaccagcacgatagataaccgactcattacagaacacatcacgaacagcaggatcatccgccagcggctgtgataccgccgggaccgcgccgctggcgaaagatgaaaattgctccggctctggttcaagcagaacacgcccctgcataaacaggggcatcagttccgatcccggcctgaacaatacaacgcccatacgaggagcaatttcaggggtcagtaacgctctcacgatcacctcaatgaacggtatcgagcagcttcagcagctcagggaatttggactcgaagaaatgcggctgcgtctcgcgagggtttgccgggctggtgatgtttttgccgaacatgcagcctttcgccgtcagcgaccagaattttttaatgccgttaatcgcggagcgactgtaacgctcacgatgttcaacaacacccagctttgctaactgctgatacgcctgattagccgtcatccggataccatgctgttttaacagcgcgctcagtgccagcgtcgggcggcttgaaccatccagcgcgccagccggagcatcaatggcatattgtggcgccaggttaggtagtcccactgcctcctggagtttctggcacgcgcccagtaccgatgaattggacaggtttaactctttgcgcataaaacccagcagaatcacccccgcctgcatcttatcggcagccataccagaagatgtttgtggcgcactggtaatccgatcgaacgtgcggatcaccttgagatggaaagatgggctgatccacattgcataagcaaacaccagttctttgcatacgtatgtaccttgttcagcaccaccgcgaacagtatttactggagcgatacccaaattttgggtatcactaccgccctgaaaaaagctaacggattgattttgttccgagggtggaattccgccctcggtgaaaagttgctcaatcagctcacgggtttgcttattatcaagccagtatttcggacgatatttctgctctccaccagcagcacggtgcaaatcgttaagacaatagcgcccatgaacgtcgcggcgaacttcgataccatcaatgaccattaaattattcatgcttctttctccattttcagtcggctgcacccgcccctgtttcaaatttcgtgatcgtgatttctaccttccccttcgggaaaactggtccccactccaccagcattctctttacctggctgtcgtcctcccagactcctgcgtgagtcagtgcgtcgaacagcgctttgttgtaattgtccaaatccctgatccgcttatctggcggatacaggatgatttctaccgctgctagttcagtcgatggcttcgggagacgtcgtaattgctcaatgatcgccacgcaggcagcgctctggtatttacgaccaacagcgctaatgaggtgacgaccggccagcggccccttgttaggggcgcgccagtaagtgttcacgctcggagggaatgggagtaccagcctcatgcaacctcccgccgcatgctgctgaccagtccaccagcagtagtaatgatttcgctggttggcatacgctccagccacagctggttaatgttcgctttcagcttgttctgctgcgatgcgtccagagaatccgccccctcaacctggttgaacaccagaccaacctcaagcggccagatacgcgaatccacataaggtaatactgctggcgctataatgggttcttcttgctctggcgccgtagtggctggtggctgaaccttacccgcggcaaattcgaccagtgacatgaacgccttccccttttcctccagttcggtacggctgatgtagctgaaacgctcgccgcgccatgacttatcgaagattgcaatggcgccagcaaagaatgcaccagtggtcttctgcttatcgtcggcagggacaaaccacacggggagatcgaagccaatacgaccgcggataaacatgatgtgatcggcgtcttccggccaccacgtttcacttgttgccgctttaacgaggaacacatagcgaccgcccttttcacgcatctccattgtgtgatccatgatgtgggtcatgccggtgatcgcctgcttctcgtggtactgagagcggctatagggtggattaccgaatgcggcaccgccgattgattccagcatttccgcccaatcttgtaccaacgcgttatcatcggcggtgtaccacacagggcacttagcgttatcgtcgtcagcaaagagatccagcgttaggggaccgaacatcgcattaatgccccaaaaaagcaggtctggtgtccgccactgatcgccgacttctttcagttcgtgtgctgatttgttgcgcagttctgccagcgcctggcaatatttattgctcattaagaccccacataattccctgacagataccactcactacctgatgcaacagactttctgctcttccgcaaacaccgttcacggcgcgccagaaaggcgctacgttccgacgggatatgactctcccggaatgcctccatccataccgtagctgcacgacggaacaaccctcccgactccagtgtttctgcctgacgtatcagatgcataatcacctgcgggtcgttggttccgacataacagctccgcacaggtttagtcccgatatctggctcctgatccggctgtatgtctgtctcaagagcaaaatgcctgcgagttttaccttcaaagcgatgagcaacacgcctgcactggcgtaacttacttgtcgactgcaggacgcttttacgcgggaaatctgcgaaagcattcgctatatcgctggaagtacatcccggatgggattcaatgaatttctgaacgtctcccataagactcatatcaccccctgaaccctgtcgggatctggctgtaatccacattcccgtagctggatttgaacatcggatcttcacgtccaggactaggtgcagcaggaacagcccataactccccaaaatgacgatcgggaccaaaaaacgtggtggcctgtttcacgaattgcgtgccgctgttccccgttgcagatacccatcccgcataacgctttacgccttccagcatggtttcagcatttaccccctctttcagacgggctttccaggctttgtaggctgctgattttgaatttccacctgcacgttttggatatgccaaccaggcctgctcgaactcaggtgaatattcctgccgggcaaaacagactgacgaagacgcgtaagcagatgcgccaatggtttttgattcattgactggttctttgactggttcaaaagagtgactggttctgggtgaatctccttcactaccccctggtgcaactcctgcactacctagtgaatttgctgcaccaggtaatgaattatttgcactcccccctagtgaatctcctgcaccatccagatgaaggagatagatattacttgagttacctttttcacctttccgggtgactttttttaccagcccggactcacaaagggccgcaatatgattcatcacagaacgtttgctaatctcgcactggtcagcaatatgctggtagctgggccagcactcaccctgatcgctggcattatcagccagcttgatcagaaccagttttcgcaatggattacccactcgaattttcatcgctttaaccatcagctccatgctcatgcagcacctccgagatgcttcatgtttttgccggaacgaaaggcaataagaggcatgttgacgcggtaattacgcccaagaggctcacagacaaccttctgacattcgcgatcgaccaggctaatacgcagaacgtacccttctggtgtgctgtaccactgtcctggacgagggcaatgaaaacgttggctggtgaaccgcttaaaaatattccggatcatttgcgcccccttacctctgaacggttcagtgtcatattgataaggctcgcaagcgccacagcgtcattgatgcggtcgtacaggcttacggccagcggagattccgctttttccagcatgggataaagctgctgtaaccagacctgatgaatggatgaaatgtaggaataaagaacgctggcattatgtgctgcatcgctcagcaccgatggaattgaaagttgtttctccatctggttaaaggcattgatgtatgcctctttgaattgggcggcgcgtttgcccgtaaaacccattgccaggaacgcaaaaccatcgcgggtgatttgatagcatgggagtttgcgggtaccgccgttgggctgatttattgaaatcgatgtaaacgcaaaattgcgttgacgaaatagagtggaacattcgagagattctattttacggataacatcagcgtgacgcttgatgaagtagtcggcaacagccagggaggaagtaacggcttggccgttaataattctaatttcaggttgagcgagggttgggacagtagccatagtggcagcctctatgttgaattcaatgaactcaccaccaaggctttccacgaccttataggtggtgagacgtacaggggtggaaataccggtcaacatagaacccggcccagccgaaactggccctgcacgccccaccataatttgggcgtagcaatgctcatgacaagaaaaaaccgcatgagcgcggttgtgctctatattgaattccgggtttccacgcccggcacccgctttatgaggtgcctgaacagtgtaacgtcccggaattgcagaatcaatgtgttcctggcgcttcacactcaacaaaatcacgcctgaatttccacaaagggctaaaacactcatgcggatagcccttgcgcagatagataacgcgctcagtttctggttcccagcgaatgacatggacataaagtccccttccatcccgaaaccagcggttaagttcctgcacgattcatcccccacggtcaggctgtgttccctgtggttacgcacgaccagactatttggtaatctgcattcatgacgcaacggccggtactcatacatccccggttgttgcgacaaacggttatttaccgttaaactgttcatgcgttggttttctccataaaatttgacgccacggcgcccggagctgcacactcgcgggcgtcacccttttctggcgcgcaaaaaactctgtataccagtgtcgaatgctgttgcagctttgcgatcgcctgatacaactcctcatcaatcacggctttttcatgtggctcaataacgccatcttcgatagccaccctgatttgctgggaataactggtgatctgctcaatcgcttccagcaggcgctgattaatatctgcgttatccacttcttccatatctgccagcggaacaaaaacgccacctgatgccctggctactgaatgtgccaggtgataggttcctccggcacgttgcagtaccagcgcccacccaatcgggaagatctgatcaccaccagtacgcaggcggttaaacagagcatctttggtgacatccagccattccgcagcttcttcataaccgccatgcagactggaaatcgtctttttaatcgcagccaccagccagcggggctgcttttcaactttccattcaggttcatgtcccacggatctactccttctgcagtggtggcggtcaaatcgccgaatcactaagctgatatctgtttggatacaaaatttgcatctcgctaatttctccggcgtaaaattgagccaggcgctcagcaagctctgttgaaggagcctgctcgcatctttcaacccggcttaatgttgcaggatcaacctgaacccctttagcgacgtgctgtaacgtataaccatgcgatttccgcaattttctcaatggtgattgcataaaacctccttcttttgcgtatatcgcatgttatttcatacagcaaacttgcgcaagttgatttgcacaatgcgcaaaaaattaatgtaatgaacgcatgaatataggaaaccgtgtcagacaacttcgccgcgcgaagaacatgaaaattgctgagctagcagaagccatcggcgtggatgccgcaaacatctctcgtctggagactggcaagcaaaagcaatttaccgaacaaacactttctaggctggctgactgcttaggtgttgatatagcagaactctttacctcagacccaaaaggtaatactgtatgtaaacacagtgatatgaggaaggattcagctaacgtgaaggatttgttccgtatcgagatactggatgtcagtgcaagcgccggtaatggactcattcagggcggtgatgttatcgatgtaatccatgctatcgaatataacaaggacaaagcactagctatgttcggtgggcgccctgccgctgagcttaaagtgattaacgtgcgcggtgacagcatggcaccaacaattgaacccggagatcttatttttgtcgatataagcatcaaccagttcgatggtgatggcatctatgtctttggctttgatgataaaatatacgtaaaaagactgcagatgatccccgataaattattggtgatatctgataacactaactacagggaatggagtattaccaaagacaacgagtgcaggttcggtgtttttggcaaggttctgataagccagacgcagtcactcaaacgacacaattaatagaaagcgtcgacaaggccaccattatggtggctttttttttgactcaaaattgcatatatcgcaattttacacttgcgcaatgtgcaatttaaatgtaatttgcactcatagagcagcgaacaggcaggacgcccacgaagtagccgccggtggcatacgaatgaccggatgattcgctgacatgtgtcttcgggaggggttgcggaactgggttgaccaccagcaacagataactcagccgacaacacggagccgtttaacccacggcgtcggagtgtaaataccgtaggggttgtaccgactggtcatcggtgccccgcccgaagatacctgtagccagtgcaagcgatattctggcggcccgttccattacgttagcggaaaccgccagctttttcaggagagcaacagataagagtttttccgcgcggtaaagcgcttctgttaagagagagaactcttatcgttgtggtgaatgcggctcagcgcacgcgggtaaggttgaagctgatagtcgatcctctgtagttaagcacccgtctggcgtgcaaccttcgccagataccgggaggcacccggcaccacaacgttattgctgtgtgaagtcttgtcggcgtccggctcttccaacaacaggaggaaggcgacagtgttctgccgtgacgccgacctttttacacaacagaaaagagtatctccgcgcgacgggctcattacccaatccacccggaaagctgttacagcaggtgctcttttctgttttgtggagaaaccaactggcggtggcaaccgccatcttgaggggttaacgatgaatgatgaccgcatgaccgtagtgcccgactttctgggcgaactggatgccggcgtgttcatgaacaaaatcgcggcagcgctgaatactgtcggattaggcgttctgaataacggcaataaaggcaaggtagtcctcacctttgattttgagcgcatgggaaattcagtcgaagagaagcgcgtcaaaattaaacacaagctgcagtacagcactccgacgccgcgcggtaaagcgtcagaagaggacacaacagaaaccccaatgtgggttaacaagggcggaaagctcaccatactgcaggaagatcagggtcaactgttcagtattaaaggcactactgacggaaagcttaaagcggctcagtgaaccgcagctaaccaattcactaccaccactttgatcattagttaataaggaatttttatgtctcagttagacagcggcacttttcagcaggtaaaagacctggtcctttctggctatcacctgaacgatattcaggggctggcttgcccgacagcattattacctgccggaacaggtgttgaaagcctcgaacgctttgctctggagcgtttccgcttccgcggcgccatgactaccaccagcattgaagactttgtccgttattcaaagggctatgccagtacaaccgaaaaagcacgctgctttattgatgctgaccatatgacagctcgctcagttttcaatattggtacgctggataaccccggtcatgcagacaacgttgcttctgtcacgctgaaacagactgcaccattccgcgccctgctccagatcaacggggaacgcctgaaacaaaaacagatcgccgaatggcttgaagactggagcgattatctcctggcgttcgattctgacggtaaaacaatgcagatttcacaggccgcccaggctgttcgccgcattacgatccaacaggcaacccagcaggatcatgaagatggcgatttcagcggtaagaaatcccttatgcaaagcattgaggccagcagcaaagacgttatgccggtggcttttgagttcaaatgtgttccatatgagggtctcggtgaacgtgcgttcagcctccgcaacagcctgttgaccggtgatgaacctcgctttgttctgcgtatcgtacaactggaagcgcaggaagaagcgatcgccaatgaattccgcgacctgcttatcagcaaattcgacggtgaatcagtagaaacgttcatcggtaactttaaagcgtaattgctctgcattaaatccccggcgccgcggggatttattgaagtgtaattctgttaattatcgccacccggcgagggattcgcacaaccaaaattcacgcggtgcagcgcgaaataaattataaggagaaccaacgatgagttttattcaaacactttcaggtaaacaatttgattatctcagcgcaactattgacgacattgatattgaagatatcgccgtggcgctttccaatatttgccgcttctccggacatctccctgaattttatagcgtggcgcagcattccgtactgtgcagccagcttgtatcaccggagtttgcctttgaagccctgatgcacgacgcagccgaagcgtattgccaggatatccctgccccattaaaagcgttactgcctgattatcgcgagattgagaaacgtaccgatcaactgatccgctttaagtttggcttgccactggaagaagccagcgtagtgaagtatgcagatctgaccatgctggcaactgaacgccgcgatctggatattgatgacagtattccctgggtaatactggaaggtatccccccgacagatttattcgaaatctacccacttcgccccggtcaggctttcggcctgtttatggcccgctttaatgaactgatggagctacgccaatgtgctgcataaaagataaagagtctgtagtgaaggcaatcagatcaagacttttgtgggagcgcgttgaaggcggtgcagcatgaaactggaaatgtacaccctggacggatcggtgattgttgatagcaatctggtaacacagttctatccagactacaaaagcggcggcgagttaacagtcatcgagactatttcagccaccggagaaactttcaccgtgagggttaaacactcgtttcttcaggtaacaagtgcgctggctacggcgtggagcgttgatgaaaagaaagctgaaggagcagctcaatgagcaaccgaattcgcaatgctcaggtattcgacgcgcgcaccggtgagtacccggtttatatgtacattcactggatcattggtggtgaacttgattttgatgccaattatcagcgcgggtatgtctgggggcatgaagagcagcaggcattcttaaacgcagttatttctggttttcctatcggctcagtggcgctggcaaaggcacctgactggtgttcgcgtgaacttccttacatagaagttgttgacggtaagcagcgtctcaccactttgaaaaaattcatcaccaatgagattccaatcatcctagctgatggtccgctttactggcgagacatgactcgtgcggagcaattggtatttgggcgtcgtccactcccagcagttgtgctggatgaggtgacgtacaaggatcgcttggcttatttcatggtggtgaactttactggcgttccgcaaagcgaagagcacaagcgacacgtaatgcaactaatggaggctgcccaatgagcaacatcgacaaacaggcgctacgagagcgctattcaccaaaacctgcacctgaatgccacatttgcggtgctgaaatgactatacagcgcatgtctgccagtcgaattacctatggctgcacgggcgcgacatacgacgataaaggttgccactacgcagaaggccgcagtatcgcagatgaccattatgaacagtctcgcgtcaccgtagttgatgtgagtgacccgaatgtgctggcgctgctggatgagctggacagcgccaacggttacgtcagcgcatacgaggctgaaaaatggcattaccacggactggctgagtctgagggggagcgggcagacagagcagaaaagcgcgtggccgaactggaatacatcgcgactgattacggtgtgaaatttcagaaaacacaggacgcgctgaaacatcaggcgctgttgcataaatcgcagatggaagccgcagaaaagcaagtggaagaattaacgatgtgggttaaacgactggccaattcactcagaaacaccaagccgaacagcaagttatacggtgccgcaatggactatttgagccgtaaaggattaatcagtgtggaggatgtattgagatgaccactattaccaaagaatggctacagcaaactatcgctgaatttgaaaacactcgcgacgatattccgtttggtctcgacgatgatgacgccaaaattttgttggtgctgaagcgggcgctggcatcgctggatgctgagcccgtgcgatacctgaataaattttccggtacatgcgtgacgttagagcagcagtcaaacgctgcagatgatgttgccgtgtatataccgctctacacagcaccgccagcgccggtagtgccggaagaggcttacagcgacgactgccctgacttatacgccagtcagccggaagcttgggctgctggctggaacgcttgtcgcgctgccctgcttcatggtgccgaacctgtaagccaaacttacgagttgccacaaacgcagtttgagcaggttgcagacctctacgaaatgcaatttgatgatgggcgcacctgcgcattccacacagatggtgcaaaagctgctcagtggttgctcgcatgcgatggtaataaggtgcaggaatacgtcaggcttgagcgctatcatgaggctcttattggtaactctccggtaattccggatgattgggttatggtgccgaagaaactaactgctgagaacggtgccaagagtttgctatccggtgagtttttagaaactacttttataagctttcctgaatgcttggccgacgaagaatgcgaaagctgcgacggcagcgggagaattaaaattgaggttcctgtcagatggacgacgattaaggctatttggaataaaggcgttgaacattttcgtagcagcaccgcaacaggggacaactaatttatgaataacttgatgatcgaccttgaaactatgggtaaaaaacctaacgcgcctgttgtctccatcggtgctgtgttcttcgatccgcaaagtggtgaaattggacctgagttctataccgccgttagccttgaaagcgcaatggaacaaggtgccgttcctgatggtgataccattctatggtggttaagacaaagcccggaagcgcgagcggctatttgcgctgatgcagtatctgttacgaccgcgcttattgagttcaatgactttatcacctgtcacgccgacgatttgaaatacctgaaggtatggggtaacggtgccaatttcgataacgttatcctgcgtggcgctttcgaacgtgccagcctcccctgcctgtggaattaccggaacgatcatgacgtccgcacgatggttactttgggtcgtgcaatcggcttcgatcccaaacgtgacatgccgttcgaaggcgatatgcacaacgcgctggctgatgccaggcatcaggcgaaatacgtttcagctatctggcagaaactgatcccgcccaccagcaacaatatctgatttaaaccgggtgcagccggttagatggagaagcaactcatgagcgatcgcttcctgactgaggaggaactggaagatgctacaggagcaagccagaagtcactccagaaagaagtattaacgctgaacggtatttattttatagaacgccgggacggttcaatcagaacaacctggtatcatataaatcacccagtttcgcgccttcttccaccagcagggtatcagcctgtaccaggcatgaattttgacgctatagagagttaacatgggtcgcaaacgtgcgcccggtaatgagtggatgccaaagggtgtattctttcgcccttctggttactactggaaaccgggaggatcaacagaaaatatagctccagctgatgcaactaaagctgaggtctgggtggcttacgaaaaaaaagttgagggtagaaaaaacagaattacattcacacaattatggcgaaaatttcttgccagtgccgattatgctgatctggccccaagaacgcagaaagattatctggcacatgagaaatatatacttgccgtatttggtgatgccgaagctaaagcaataaagccagaacatatccggcgttatatggatgcccgtgggcaaaaaagccgtgtccaggcgaatcatgaacacagctctatgtcgcgcgtatttcgttggagttatcaacgtggttatgttcctggtaatccttgcgttggtgtggataagtttcctaagcctcaacgcgatcgatatattaccgatgaagagtacagagcgatatataataacgcaacgccagccgtcagggctgcaatggaaatagcttatttatgtgctgccagagtttctgatgtattgaaaatgaactggaatcaaatactggagaaaggaatttttattcagcaaggaaaaaccggagttaaacaaattaaatcctggacagatcgcttacgtgatgccgttgaaatatgtcgtgaatggggagaggaaggccctgttatcaggactatgtatggcgagcgttattcttataaaggatttaacgaggcgtggagaaaggcgcgaaaggctgcgggggatgatctgggacgtcctcttgactgcactttccacgatctaaaggcaaaggggatttcagactatgagggaacggcaaaagacaagcagaagtacagtggccacaaaaccgaatcccaggttcttgtttacgatcgcaaggtgaaaatgagcccaaccctggacaggaagcgttgagcttttcgatgtgcgccagttaaaattctggcgtttttttctcaccgaattttctcattttttctcaacgtgattttcatcactataagaaaatcacgtaagtgcttgaatagtggcggagagagagggattcgaaccctcggcggagttacccccgcaacggttttcgagaccggtccgttcagccgctccggcatctctccgtatattgcaatgatgccaggtaatttggcattttaacagaccctattcgggtaattttgttcaagtgacgagtttacgagcaaaacgatgattaagtggccctggaaagcacaagaaataacccagaacgaagactggccgtgggatgatgcgctggctatacctcttctggtaaacctcaccgcgcaagaacaggctcggcttattgcgctagccgaacgttttttgcagcagaaaagactggtagcgctacagggatttgagctcgactcgttaaaaagtgcacgtattgcgttaattttttgcttaccgatcctggagctcggtattgagtggcttgatggttttcatgaagtgctcatttatcccgcgccctttgtggtagatgatgaatgggaagatgacataggtctggtgcacagccagcgtgtcgtacagtcggggcaaagctggcaacaagggcccattattctgaactggctggatatccaggactcgttcgatgcttcgggtttcaatctcattattcatgaagtcgcgcacaaactggatatgcgtaatggcgatcgcgccagcggcatccctttcatcccgttgcgcgatgtggctggctgggaacacgatctccacgcggcaatgaataatattcaggatgaaatcgatcttgttggcgaaagcgctgccagtatagatgcctatgccgccaccgaccctgctgaatgttttgccgtgttgtcagagtattttttcagcgcgccagaactgtttgctccacgtttcccggcactatggcagcgtttttgccagttctatcgccaggatccttctcagcgcttacgggtaagcgctgccgaaggcgactacggcgaggaatccgaacattaattcctcactttgtgggttaattaaccaattgaattggcgcgttaattttactgttgacacgttatagccggcccagtattatgcgcctcgttgaaacaattcctctgtagttcagtcggtagaacggcggactgttaatccgtatgtcactggttcgagtccagtcagaggagccaaatttagggaagcagacgttcactgacgtctgctttctgcatttatatcaactgattaaccccttcttcaggttcactctcgtttactaaaaaccactcgaagctatacccttttgctggtaaagctggttcgatttgcgttttaccagcacgcggagggaaccgtcatgtcactgactgatactaaagtaaaaaatgccagaccagcggaaaaggccgtcaagctcgctgacgggtttggcctctatcgattcaaaatactggcagtcaggctatcgctttaatggcaaacagaaggtgttttctattggggtttaccctgcggtttctcttgctgatgccagacaacgccgtgacgaggtcaaaaggctgctggatcaggggattgacccgaacgcaaaaaacaggctgatgaaaaaatccttcaggaaaagcgcgataaaacccgctcgtcccgtgtcgtcgccaaaagctgatgcaccataattctgcctatgatattgacggaaaacttttcgcctgcaccagaaatttatctgccatttccgctaccggcgtcagactgcctgtatcaaccattttcacaaaatatttcacgtctaaagttcattctactccctgcccttaatctctacggcgttatgtctcagaattatttgccaagtgcctgccagtttttcacgtttcatcagacgctggtacatagccattgcggtaaggtcacagcatttgacttgtgcaattacagacaaagttgcgccatgccggagcaaagtaggaattagatcaaaacttcaacgctttgttgtttttgtcagcaaacaaacgcgcaaccttatttccccctttgacaagccgatcgcacatcgttactatgcgccccgttcacacgattcctctgtagttcagtcggtagaacggcggactgttaatccgtatgtcactggttcgagtccagtcagaggagccagattttagtttcgggacatcctggcgagtccggagacgtttaaaaaacaagaaattatctttacccggttgatctgataaggtttgccgggtttttttgacatccatagtttttggggcttaatcgggcctcacggttcgttgagtaaatggagccccctcctatggcattaaccgataccgctggcggcacgcagaccgatccgggtacaggaaaaccgtcagaaaatccacccgccgctcccaataagcccactccaccgaaagaagaaacgccgcccggcgcgccggagaaatacgcgttcaccgcccctgaaggtcaggaactcgataccagcgcgctggcgcagttcgaaccagtggcgcgtgaactgaacctgacgcaggagcaggcgcagaagctggtggacgtctatccgaaagtgctggcgggagtgcaacaacagcaagcggagtcatggcagaagcaaacagaagactgggctgcggcagttaaagccgataaagacattggcggtgacaagctggcgtctaatcttggcgcagctcagcgggctatcgacacgttcggtaccaaagaactgaaagagtatctcgatggtacctgcgccagatctctggtcaatgctgcaccgtgacggaagcgattccacccggcacctgttaccacatcagcgccttttactttacgggctgcggcctgcaaagacgtccggctttgctgccgcgtgaccgtcaatctgcgccagaatccgcgatctttcgcgcccggcactcaaccggtgcgtcactttcgtcgcgcaaagcgacaaagtgacgcacaaccactacaccgcgccatgcccctgttttcggggttccggcgttcattcccgaatctgacacgcctttttggggccgctgtcagcaagaaagaagagaaaaagatcgataccgaggggggggctgatgccccggagaatttctgctcacgcaggcagcctgtaccgcgtacagtctgaaactccctatacctcaacaaactgccactccggcgtaaaggtatcgttctggcgcagccaaagagcatacgccggagactgttcgtgttctcaaaatcacaggagaagtgtatgggcaagttaggtggtgaaatgaaggcactggcaaagcactgtggcggtagccataaaacggtgaacgattgcattcatatcgtgcagcgtttcgatcaccacttacgggctttgaacgtccatatccagcgggttgcgcagattaaggtgcgccacattgaaagctatattcatgaaaggttggcgcaggggatcggcaaacgcacgctgcaaaatgaaatggcctcgctgcgcgctgttctgcaacaggccgggcgtaaacaggtggcagagcatgagtggctgactaataaatcgctgggtctggctggtgcatcgcgcagcgggacgcgacaggcgatcacgccggaacattatcatcatgtgctggagacggcccgcatgaaagctccgggactggcggcggcgctggaactggcgaggctgatgggcttacgttcacaggaagcggtgcagagcgtgcaatggatctggggcatggggacgggcgtgggcggtatgtggcgcaggtgtatgggcaaatttgacagctggctaagagcgagcagcggatggagcaggttaccaccgttcacagttagtgaaagactgggcggaggtggtaaatatcaggctgcattaccttcccccttacagtccaaacctgaatccgatagaacgaatgtggaaattaatgaacgaacatgcccggaataatcgctacttcagcagtacgcgagagttcagggacgcaatatctgtcttttttaaccagacgctgccggatatagcggactcactgacatcccgaattaaagatcactttcaggtgctcactcccgcatcttgaggtttattgggtatataatcgttaataatcatcagcgcgttattatcaaattaaaaacaacgcgctcgtaatacttaaattattcttactggtaactgaagaaaactctctcctgccagaatatgctcctcgcatcctttacattaactctttgtttctatagcatgaaataagtttcagggagttattattcatacaaggagaacatcttgaagaaaatattcataacaattatagtttcattatattgcgcgaatatatgtgcaaaacaatcccccagtacagaatccaaacccgttaatttcatcgcccaaattgaaaatatcgattttaataaaaccgccattagcagtgacctgaaacttttactcgccgaccgttattattttaaagataaaacaccctgtaatactaataccctttctgcgcgcgcagaatcaatgggactgacgacagaagaatatattaataaaatacgcagtttaagaccggctattctcgatgaccgttatttttacctgacggtcgatcagtgcgatgctggcggcacgcccatgctgactggaatcgagctatgtaccgaagcgctgtgcggtgccgaatacatgaaaagatcgtctgacttgtggctggatgatgaactgcaaccgacggttaaacgtcaggcaacaacagtagtccatatgcccctcccctatgacaaagagaaaaaattatggaaagtcaccggctggtatctggaatcctcagaagaaacaggggaggtgatgcagagtaaacagatagcctttgaaggctataccaacgaagaaaacttcgctaaccgacaacgtgtttctgtatttaaatctttctatgaaagcggcaatctcaaaagtatttatcattataatgcgcaaaataagcgtgacggaaaagctgaaacttactttgatgaaaaagacaaaatagcggaaacgctgacgtttaaagatggtcaacccgaaggggaatacatcgtataccatgaaaacggagccgttgaaagtaaacgttactttgcccaaggtaaaattaaagatggcgaatgcccacatttttatgataacggcgttttaaaacaaaaacacagctatttaaatcagaaactggaaggcccggcatttgaatatttccctgatgggaaaataaaggggaaatattcatacagtaaaggcaccattgtcggcaccagtacggaatattattctaccggtaaaattcgtggtgtttaccacagaaataaccaaggtgaaaacgacggaacgttcgaacaatacagtgaagagggcaaactcctttctaaagcgacctataaaaatggcaaacagctttctgctcagagctggtatgaaaatgggcatcccaaagaagaatcctcttttgatagtgaaggccgtaaacatggtgcggtcaaagaatggttcagcaacggaaagcctgcctcatccaaaatgtataaacatgatgtgttagacggggatttcgaaaagtggtacgaaaatggtcaccgcgaatcagtctatccctataaaaacggtatgctaaatggggacgctaagcactggaatgaacagggcaaactcacctataccaccgaatataaagacgataaaaagcagggagccgatcgccgctggagcgaacgtaccggtaaacttgttgaagaggttatgtttgctaatgatgaaagaaacggcctgaaaagagagtttaacgatcgtacgggtaaggtcttaagtgcgctgccctatgtcgatggcgacaaggaaggtacagaagaagcctatgatgaagacggcataaaatacatccgttgttaccacaacgatgaagagctttcagagctatatgcgccgactgacgtcaccaataaggcaaagcagggtgacagcactgcgcaatatcatttaggtaagtatgagtttgaatgcacaaactacgatgcggcgatgaaatggttaactcagtccgcagagcaaaatcatcccggcgcgcttctctttttggcctatgcgtacaacgacggtgatggcgtagcgcaagacagtaaaaaatatctctcctatttattcaaagcggcagagcttggcgaaagtgatgcgcagttagaagtgggatatttaaatcttatcggcgaaggaatgccgaaaaacctgccggaagcctataagtggattaaaaaatccgctgaccagggaaatgctcaggcgcactataaccttggactcatgtacaggaatggtgatggcgttgagaaagacctcaacaaagccaaacttcatcttacagcggcggtaaaaggcggcgtcaaacctgcactggcagccttaaaggaattaacgcctcaaactaagtaaatatgactttgctgtaaagaggctattcaaacggaactgaaaggatacacgttgctatgaaatttaaattcgccacattactcacagccgccacggttttttactcttatcagagcgttgcacaaagtcagcaatcgcctgatgtctggtcagttgtcgaacagaaactgcaaaatgccgtccctttaaatgaaaacaccacttttaaatcgcaggcagcctggtttgaattacacagggaactgtttatgtacggcccgatgagccgtgcggatgcattactgaaaaagctggacacacaatcgaatgatgcgaagttttcgctaaaccatgaggcctcgtggatcgctgaaaataatagcccggatgccgcgatggttttcctgtccaaaattggtctcgataaaccgtcgagcattaccgcctacgagagctacgttgatggctgggttaatcgcaaacagcctgaaaaagccttagcccttcttagcaaaaatgccgacgcgaggaatttttatttagccacggttttagaatcctgtcactcagagcctgataaaaccgccgctatttataatgaaaattacgctgataaaattgttgttccttatactcagctaaaaatgctgcttattattgcgaagcagtaccatgccaagggcgacaccgcaaaggcgttggtttacgcagatagcgcgctgaaaatgtttgatacggctattgctcaacaaccgagtgctgaagcctaccgttatcaagagtatctcgacctgatggagatctattacgccacgggtaataaagagaaggcgatggcgttgtctgcgagattgcgcaaagcaaccggcaataaaggaagctatttccagtattcattaccgggattgctctctttttataagaaaaacgagctgacacagaattatcaggagacgctttcaacctgtgtgacgcaggtcgataaaatattcaattttgccccttcgccgcgcattgaaatggagctgattgatttattaagcaagcttgatgatgttgcgctgatgaataagcgtatcgatttgctgatgagcgcgccggaatatacctgctacgacgacaggtattgctacgagtacaaaatcaaagcgctgaagaatctctttcagcataagcagaatgctgtggcggaaaagcatatcgcaaccctctccgccgaggcgcaaaccctgacgttcgccgaatgggaagatgcaacaaatgaaataggtgaagtactcaaagaaattggccatcctgaggcagcgcaaaaattagccgtcagcgccgaggcgatttacctcagccaagcaaaagcctggcctgatgaagatatgtcgcgttcctttcaaagacttgcagagctttacggctatggcaacgacacggtgaatgccaaacgggtgttacaccagcacgttccctctctcgaagaggaggcgatgatcgaccactacatgaatgcaaaacagtggagtcaggcaagggaattgatgattaacgcagatagggtcgataataaaaacctgatgctgttacgccagatttgttctgaaaacacgcccgagtgtcaggaacatattacctttacgctgaaaaaattaaccacgcaggcgtcgattacccgccaggacgacaccggtaatcagcagctttatcagattgggaatatttttcacagattgggtatcataccgggagcggaacagcaggcgctgattcaggcgttgtataacaaggccgcagagcctaaaaaagccacgccttaatcgatttacccgcccggccacctttctcacatgcgggaaggcggcgggcgggaaaaatcaatcgcggaagtttttgaactggaacggctggcccagattgccgccgcgcatcagcaccgtcgctgcctgcagatcgtcgcgggatttaccggtcacacgcactaacgtaaattcgaatccaaacccacagagattaccgcaagatattaatgttgacccaacaccgcctgccggaagacccgcgctggaacgccctgcacgaggagttcagctttgacgacgacgacaacctgctgggcatgaacatgccgcccgaaggtggcgagcatcaggcgaaagtcaaaggcgaccgcctgctgctacagggcagaccaccactatgagtacgacgagttcggcaatcccatcgctgaccgctggggcaaggcgcagtgccggaagcaccgatttgaatggaacggcgagcaccggctggtgcgctttaccgacgtgcgccactatgatgatgaaggctttccgcgccactcgtggcgctatgagttcgataatggcgtgaccaccctatatccctgtccgacgcgaaaatcctcagtatcaagccttctgataatccctttaagctgatcgattctcacggtcggtatctgcttgttaatccgggcttgtgggtccaggcgctcaaggagcgtgaagtgcggcgcaatgttttcgccttccggcgcgtttcctgacgtagacgcgattatcggcgacaggtctccggcgatggtgatgaagccgcggcacaataaggccttaacgggatacagaaccgcctcccgctaaggcttcattcagccactttccatatcacataaatacgcctcttccgctcctgtccagcagcaggcgacagctcatttcgttagcgaaacggtggctcattaaacgtgcgtaatttacgtgagtgcaaacgatcaccttctgcgcgtagtaaatcaatagcacgaataccaatttgcaaatgttctgaaatagccccctcataaaaccggtttgcctgcccgggcagtttaatttcaccgtgtaaaggtttgtcagaaacacaaagcagcgtgccgtaaggcacgcggaagcgatagccctgggctgcaatcgtcgcgctctccatatcaatcgcgaccgcgcggctaaggttgaatcgcagcgccgatgcggaataacgaagctcccagttacgatcatccgtggtgacgaccgttcccgtgcgcagtcgctgtttcacctcttcaccgggcattccgctaaccgctttggtggcgtcgtacagcgcacgctgtacttccgcaatgcttggaataggaatatcaggcggcagaacggcatccagcacatgatcatcgcgtaagtaggcatgggccagcacataatcaccaatcgcctgactttctcgtaaccctccacagtgcccaatcataagccagacgtcaggccgcaacacggccaaatggtcgcaaatcgttttagcatttgaagggccgacaccgatatttaccagcgtaatcccctgcccatctgccgttaccaggtgccaggcgggcatctgatgcttcttccaggccagatcggaaatagcctcttccggcgcttccgtttctgccgtgatccaaattccgccggcacaggaaagcgcgatatagggactgtcaggatcaagaatttggctgcatccccagcgcacaaactcatcgacatagcgggtgtagttggtaaacaaaacgaagggctgaaaatgttcaaccggcgtaccggtatagtgccgtaaccgggccaacgagaagtcaacacgacgcgcgtcgaagtgcgatagcggatagaattcgccggggtggaacagaccgtctgccgtctcatcgccaatctgcgccagttctgtggtaggaaaatggcgcgttagcccggcgctcatagaacgatccagcgtcagagccgagccatcgatcacataaggatacgggatctcatggtgcgaggcctctaccgcaatatgcgcgccataatcatggtaaacgaggttaagctgttccagaagataagcgcgaaatagcgcaggccgcgtaacggtagtggtataacagccgggatgagtaaagcgtccaaaagcgcgtgttttaggcgggttcggtgtcgcgccatcccagcttacagacagcgaaggataaacaaacagtccgttaagcctggcgtggggatcgggcagcgtaccgttatcaacatagtcagcgatggcttcacggagcgcgttaaccgactgctcgtatagctcctccaggcgatccagcgcctgctcgggcgttaggtttgtgcctttattttccatattattctccttagcgttcacaggtgaggcacgtcattcgatagtatgacagcaaaggaggaaactaaaggggttagcgtaagggtggcgacagtaaacatgaaccctttaaaaagaaaagagaactatcttagcgccaccatcatcgctcaaaaagaagggtactggtacagccatttgttaagttcattacaattagtcatataaccatttcccggcttttgctgactcgatcagcatgctgatagtgaaatctgggacgggtacaggttccgttttcttgaacggatgccatgaaaaagggtgattaggaaaataggtttctattctgaagttacctcgctcgacattgagttcctcgaagaatttattcatgagatcttcggcttcaagttcatcaatgctcagatcagtatcaaggtcaatctctggtgttaattccacttgcttaatgttgaaaagatatgtgccagcataaggccgtacaagctcgtaaacttgctgttcaatattgtctaccataacttatcattgccccgagcaatggtattgtagtcgcgtatagtgcaatatgttatttgtgacacatctgcggcaaggataatttccccgatcaaaggaatggaacgtccaacaaacggcgcaatgttacgaaccataacacgtctggctgtccatggggtgtaaccgcctaaccatgtcggaagggatattccaaagggaaattttgactttttaaacactgcacgtgcagtcctggacgcgtatgatgtgcctttagtcgctccagcgggtttcgcccttgtccaaagattattacgacctgatgccaaagcaacaacagccccgaaatctgcaacaccaatcccaaactggcttgcggtattctcacaaaaaatcataacagaagttcggcagcagtcagattggattttcctgcatagaagtatgttccatttagttcttctactgtatccattagaaactctatagttactattttggtttacttattgtacatccttgtttcgaatgaaagaaatcaatcttttgggaaagaacggatcaagatcactggaaatatctgaaatcagatgaaagagacagtcgcgattcccaccaggggcatcacctggcaagcttgtgtgatcgctccgtttgaaccgaacacatctatatgtcagcatactgatacgggtttgatcttgcggatagcggtatcggttaatgccatacgtaggggctccattttctcagcgaaccgtgaagcctccgattaagcccccaaaaaccatggatgtcaaaaaacccggtaaaccttctcaggtcaaccgggtaaagataatttattgttttttaaacgtctccggactcaccaggatatcccgaaactaaaatctggctcctctgactggactcgaaccagtgacatacggattaacagtccgccgttctaccgactgaactacagaggaatcgtgtgaacggggcgaatattaacgaggtgcccctggcttgtcaaagcctgttttcacaaaaaaagttcgtttgctgctttattccacacttcggttaaaattcaccgtttcctgatgattttcacagcaaaaagcgcttactccctctttacgcgcgggtatctccacagccagcgcccgcttatcagacgccagtaaaacagtgcgccacgcacggcccagtcaagaaacatccccagccaaacccctacaacccccatacccagcacaataccaagcgtataccctgccacaacgcgacagccccacatccccagcatcgatacccacatcgcaaatcgcacatcgcgcgcgcctttaaaacccgacggcaacacccacgcggccgcccaaattggcataaaggcagcattaagccagagcagaactttcactacctcttttacgtcctgctcctgggtataaaatgaggcaaacagacccgcaaacggcgccgtcccccaggcaattgccgtaagtacgatagtcgacatccagaatacatggcgcagttgacgctctgcctgaccaatttgcccggtaccaagacgcttaccggtgataatagtcgacgccgaaccaagggcgttacccggcaggttgataagcgccgccacggaaaaggcaataaagttacccgcaataacgttagtgcccattccggcgacaaacatttgcgtcagtagcttgccaccgttgaacagcactgattcaatgctcgccggaataccgatacccatcacttcccagataatgccgaaattcagcggcttcagatagcttttcagcggaatgcgcagcgccggattaaaaccaatcatcagcacccaaataatcgctaccgcgccgatgtagcgcgaaatggttaatcccagccccgcgccggcaaaacccagcccttgccaggagaaagccccgtaaatcaggatgctgctgataataatattgagaatgttcatcccgccgttaatcatcaacgggattttcgtattccctgccccacgcagcgcgccgctaccgattagcgcaattgccgcagccggataactcagcaccgtcagttcaaggtacgttaacgccagcccctttacttctggcgtcgcctcgcctgcgacaatattaataatttcactgccgaaataatgaatgaccactgccagcacaacggcaaatagcgtcataatcaccagcgactggcgcgccgccgcccttgcgcgtcgcctgtcgcgcttgccgaggctaaaggcgaccaccaccgtagtaccaagatcgatagccgcaaaaaaagccataattaccatattaaaactgtcggcaagccccacgcccgccattgcttccttgcccagccaactgacgagaaaagtactgagcacgcccattagcaaaacacaggtattttccagaaaaatagggatagcaagtggggtgatttcacgccagaacaacactttgtagctcttgcgtttggcataccagggcgtacggacgacagcctggcgtaaggcagtggagacgttcaaaatggaccttaaagaagagagttgaaaccacatttcaataatgagcgagaaatcgtaaggctgcaaagctttttgcagaaaaaatgtctgcaaatgcaacaaagtgatgagataacccgcaatcgaatctgtaagaggttaaatggggtttgacaaaaatttttccgccgctaatatacgaccccacacgattcctctgtagttcagtcggtagaacggcggactgttaatccgtatgtcactggttcgagtccagtcagaggagccagattttagtttcgggacatcccagcgagtccagagacgtttaaaaaaacaagaacttatctttacccgattgacctgataaggtctaccgggtttcttgacatccatagtttttaggggcctaatcgggggcctcacggttcgctgagaaaatggagcccctgccatgacactcactactaatacagatactccagcccatgaaaaccagcaatgcgacaggatatttaaaggccaggcctgcccgcgctaatgttgaccggcattccggaacggcgctccagcacctcattaacccgcgaagtatcaacgtcatcccctttgataaacgtgcgcagcactggcgtaacgggcaatggaacttttttgtctgactcaaattcagcacggttgcgagaaagcggttcgtgtacctccagccaacgactgccatccggctctaccgaaaatttaacgggcctgtcgataatctgaacgcgggttcctacaggaacatggtcgaataaatatttaatatcgtcattgcgtaaacggatacagccctgactgacgcgaaggccaatgccaaagttaacgttagtgccatggatggcatataacctgccgatatatattgcgtatagccccatagggttatccggccccgcaggcaccatcgcgggcagcgtttttccctctttagcatattcccgacgcgtattagccgttggcacccaaaccgggccatcttgtttgcgttcaaccgcagttacccagttgcgcggcgtttcacggccagcctgaccaataccaataggtagcacctcaaccgtattcgtgcctgcgggataataataaaggcgcatctcggcgacgtttaccacaataccttcacgaacggtgtcaggcagaatcaactgctgcggcaccaccagtgtggaaccagactgaggtaaaaacacatccacgccgggattcgcttcaagcatattactcagcccttgaccgtagcgggcggcaaatgactctaagggctgagtattgttctgcggtacggcgattgtgacaggctgtcctaccagacgactgccttcgggcggcaacggatagcttatagccagcgagaaatggcttaccaacaagacgaaaaacggaaaaaaaggtgtgatacgacgcattatatcccttcctttgtcgcggcaggtgtgcgttaagtatagcttttttctcacatggctggtgttgtgcgcccgggttatgttgcgtttgcgttcccctccggcaggacaatattactggccgccaactcccccatgttgtggaacatggcgcacgcggcttccacgatcggcatcgccagcgccgcgccgcttccttcacctaaccgcatcgccatatgcaaatagggttccatagacaaatgcgcgagcgcgatgcgggcgcccttttccgccgaaaagtgcgacgggatcagataaggtctcaccgcaggcgcaatctgacaggccgccagcgctgccgagtaggaaagaaagccatccagcaatacgggtaagccacaccttgccgcgccaagcatcacgccggtcatcccgaccagatcaaaaccacccaccttcgacaacacatcaatgccgtcgcgcggattgggctgattaatcgcaatcgcccgccgcacgacgtccactttattatcgatgcgggaaggcggaagattcgcgccaatccccaccacctcttttgcatcacttcctgtaaaaacgctgaccatcgcggcggctggcgtagtgttcgccattcccagctcccctacgccaaataaggtcacgccgcgttgcgccaggtcgcaggtgtagcgggaaacctccagcaaaagcgcctcagcctgcaagcgactcatcgccgggccaacggcaatatttccgcagccgcgcgcgacgcgcatattaactacgccaggaataggttcggcatcaataccgacatcaatgacatgcaccttcgcaccggcctgagcggcaagcacgcatacgccggttgttccccgcgtcatattcgccgcctgaatcgccgtcacgattttgggcgaaaccgctacgccttcatcccagacgccatggtcggcgcacatcaccagcaccgccttttcacctacctgcggcgtaccgttaagacccggcatacccgcgagctgaacggctaaggtttccagtctgcccaggctgcccggcggtttgagcaggccgtcaatatgttgctgcgcacgcgccatcgcctcggcgtccggcgcaggaatgtcacggagtaaagcgtgtagtgtctgcataagatgtctcgtccgtaataatcggctcataacagagccagcagaaagatcaattcaccaagttcgatcgccgcgcccagcgtatcgccggtttgaccgccaagcgtacgtttaagcaactggccaaggatgaaaatcgccgcgcatgtgaccaccattgcggccaacccttgcataccaggcagtaataccgtggcgacgattaccgccaatcccagagtaatgcaggtttgccgtccgctgactttaccgataaatacattgccaagcccctcttcacgggcgtagcgatgacggtacatcaataaaacggcgctgccgcgtccggccgcacaggccgccgccaacgccgccaacattggcgttccacgtaacgccagttcgctgaccaccagaatttttgccagtagcacaaaaataagcgccagcccgccatgggttcccagacgactatcacgcataatctccagcattcgctcacggcggcgcgcggaaaaaatgccatcgcaggtatcggccagcccatccaggtgaaaaccaccggtcagcagcgccagcgccagaatacagaacaacgccgctagcggaataccacaccagggttgcaggaggatgaaaatcaggccgcttacgccccccagaatcaacccgataaagggaaacatcacgatcccacgcgaatactgctcgaaatccagtccctgcgaccagcgtgacggcacgggcaagcggctaataaaagcgagcatggcccaaaacagcttactcatttaattttgactccaatacctgagactaccagccagacctcatccgccgctgccgccagtcgttggttgacccgaccggcaatatcacgaaaatggcgcgccagacggttttccgggacgatccccattcccacctcatttgtcaccagtaccactttcgccgggcagcgctggcaggctgcaattaaaatctgaatttcatcgtcaatggcgcgctccatcgccgcgtaatcccactgttcgggatcgttctcgcctcccagcgcaaacagcagattcgtcaccatggtggtaatacattccagcaaaatcgcgtcgtcaggggcaagatccgcggtaatcaacgtatcaagatgccgccagcattctgcggtccgccagtgtgccggcctgccatctttatgatgctgaattctcgccgccatctcgtcatcaagaatctgcgaggtggcgatatacagtacctgcggcgcatcgccaattaaggcttcagcatgacggcttttaccactacgtgccccgcccgtcaccagaatcatcataccggctcctgatgttgttgcatgatggtataaattttatcaatatcaatatgttgccgcatcgcttccgccagcagatcaaattgccgcgctttatgatccgcataacaaaaagtcgtttcccacggcgcaagcccctttcgcgcccgtaacccattgaccaccgcacgggtaaaggcatcgctgtcaaacaggccgtgaaggtaagtgccaaacgccagtccgtcggcggtgaccgcgccatccgccacagagcatccatttttctgtaacgtcatggccgtacagcatccttcctgcagcaccgtttcccccatgtgaatttcataaccgcgtaccggtagccccgccgcggcagccagccagccgggcagctcgcctgacattgtcgcgttaacctgcgtcgtggttttatcctgtgcaaagcgagtgattgtattaagcagccccaggcccggctgcgtacccagccccgactccacctcatccacaatggtgtcgcccagcatctggtagccgccgcaaatccccatcaccggcacgccctgccgatgtgtctgcaataccgcatccgccatcccgctttcgcgcagccaggcgaggtcgctcagcgtattcttactgcccggcaggatcaccagatcaacgtcagtcaacgcttccgggcggcgaatatagcgtatgcgcacatccggctgcgccgccagagcgttaaaatccgtaaagttagaaatatgtggcagttgcacaatggcaatagtgatatcacggggggcgttaccgcgatatttatcgttttgcagcgcgacgccatcttcatcttccagatccacatccagccacggcatcactcccaggaccgggacgccggtaagcgattcgatttgttcgataccggaatagagtagcgccacgtcgccgcggaatttgttgataatgacgccctttactctgtcacgctcctgtttatgcagcagcgccagcgtgccataaatagcggcgaatacgccgccccggtcgatatccgccaccagaataaccggacactgggccatttccgccattcccatattgacgatatcgcgatcgcgcagattgatttccgccgggcttccggcgccttccagcacaataacgtcatattcctgcgccaggctgttatagaccgcaaggatttgctcacgcaaacgcggtttatagtcatggtaactaaccgcatccatattggtcgccactttccccatcagcacgacctgcgcctggcgatcgctggtcggtttgagcagcaccgggttcatacgcacatctggcgtgatccccgcggcttccgcctgaaaaatttgcgcccgccccatctctttaccatccggcgtaataccagaattaagcgccatattttgcgatttaaacggcgcggtacgcagaccatcctgataaaaaatgcggcataaacccgccgccagcacacttttgccgacgtcggatgccgtcccctgcaacataactgcctgcgtcatgacgcctccctgaatgcgcacttttgcattcgatgaaaaaactccgtttctgttttacacagcggcagtcccagttgagtatgaagtttgaccagccagggctgggttagccccgcgtgttccatcgcttccgtacacgcgaaaacctcgccaggcgcgccatgcgtcaggatctggccctggcgtaatacgtatacggcatcgctaatttcataaataagatcgatatcatggctggagataatgacatgattgccctgcgccacaatccgcctgatgatagcaatcatctgagtgcgccctgcgggatcgagaccagcagtgggttcatccagcaatagatagcgcgcctgtagcaccagcgctccggcgatagccacacgttttttttgcccatgactcaaacactgaatgggctgatggcgaaaatgttgggcgtcaaccagcgttagcgcctcgtcgacgcggcgcgtgatttccgcctccggcacccccaaattacgtaaactaaatgcaatatcgctatcgatatcagtataaaaaatctgctgttcagggtcctgaaaaaccgtcgcaacttgctggcgcagcgccagtagtccgcgcttgctgtaatccagcggttttccctgccacaacacggcccctttttgcggacgcaacaagccgctcaggttcataaaaagcgtagacttcccacagccgttcgcgcccaccaaaccggtaacaggcgaaagcgaaaaatccatatttaaccctttaagtaccggctcattctgataacgaaaccacaggtctgaagtggcaagcataatagtccttacaggtgaaaatcaccctgatacagtttgatatccagcgtggtggtcatttgctgataacgcattaacacccgcgtaaacaggagtccagccagcatcgccagagatcgatagccgttcggcaggctgcaataaccaaaacgcagcgtttgcgcacgacggattgccaccgcctcatccagaagaataaagagaaagcgccacgttaacaggatttgctcggtaagcaggcgtggaatatgcgcgcgcttaagcaagctaattaactgcggaaacggtaggttcatcaccagccacaacgtcgcggacagcgccgtcaggctacgccagaacgtttcattcgccgtaaccacgcccgcacgggtaatcccgatccagtacggcccaacagatatgccagccagcagcatttgcggctcgcggctgatgctgaagataatcgttatcacgccgaccaacaaaaatccaaaaggtatcgccatccatcgacaccagcgccagagggatatgcgcaatagccaacagctcaatccggcaatgatcagcagctcaatgccctgccctacaggcggcagaacaaacgccagtatcatcatcgccagccacagcaaaaacttgcgctgcggcgcaacgtgtgcccagcggctttgatagctgagtcgatcaagcccggtcatcacggcgttgtttacctttgcaataccccaggatataaaaaatcaccgccgcgccaagagagccctgaagggtaaacagcaggctttcaatttcaccgctggcaggttcatataacggctgaaaccagggtttatactgcggcgcaatagcctgaatctggctttccgcttcgccgtctgaaccgccatattcaccgccatggttaataaaaaacggcagaatcaccagcgccaccaccatcgctaacaacatcaacgtttttttcattttaatgtccttgtacggtaatcacttgccgtttggttaactggtcataaatcatgacggttaataaaccttcagcaatggcgacaggaatctgtgtgaggcagaaaatccccataaacttcacaacagaccctgtcgctccggcatggggatcgggaaacgcaacgccaagctggactgaagtcacaaaataggtcgccaaatccgccagcatcgcgcacagaaaaacggcgacatcacggcgcagtccggcacggcaggccattttccacaccagataaccgacaaccgggccaatcaccgccatcgacattccatttgcgccaagcgtcgtcaggccaccgtgcgccagcaatagcgcctgaaacaacagcacaaccgcgccgagaatcgccaccaccccgggcccgaacaagataaccgccagaccaacgccggtcggatgtgaacaactccccgttaccgacggaattttgagcgcggacaggacaaaaataaacgcgccgcacagcgccagcagtaccttctgatgattatcctcctgcacaatacgccgtaagcgcaccagtccataccacaagcagggtaaaaacagtagccaccaggccagcgcccacactggcggtaaaaagccctccatgatatgcatcgcaaacgcctgttgcgggacaaccatcagcaatagcgctgcagccagtccactgaaagacaactgtcgaagctgctgttcaagtttcattctgcatactcccactgtttattgaccagaatggtcgaaaaatagggcaacggtcgatcatcgttgacctcgtggagatggcgccagcactgctcgccgggcagtgtggcctcggacatcattaaggcgcattccagcaggccagcctgcgccagcaaagctttaatacgggcgaaccggccatacactttcatcaacaccaggctatcatgctgttgtagcgcctgggctatttccgcttccggcgcggtacaagaaataaccgccagcgattgccgttctatggcgagcggcattttcgcgcgggcggctatcgcggcgaaggacgtgacgccggggacaatctccagccactccgggcagccgattcgctggagtaaaaaaatccaggtactgaatagcatcgcatcgcccagggtaataaaaccgacctgtttacccgcttccacctctgcggtaagcgcggcggcaacctcgttccagaccgcttctttctcggcgccgtcagcgctcatagggaaatggcaacaacgtacttccgtctgctcgccgagatagtcgcgcacaatcgacagcgccagactatcgccccccttacgaccggcgggcgcatacagaatgtccagcgagccaagaatccgcgctgcgcggacggttatcaggtcgggcgcgcctggcccggtacttaatgcgtataatttaccgttcatgccgcctcctctaccgccatgttcagcgcctggtgcaaatgcgcgacaaacatcgcccggatagccgggttttctcccagcccgctcagccacggcgtcgccggaatgcccgccgcgttaaagcgcattttccatgagtcgccgtcgtctgaagccatatcattaatggcgtgatcgcccgccaccagcattaatggcatcaaatgtacgccggtgacgccttcgtcacgcaggctgtcgatcaggatgtcgacctccgggtagctttctacggcgccgacgcgcgccggaaagcgctgcgcggtcatcatatgatcgagacaggcataagctgcgaatgcgtgatggctggcgccgtggcccataaaaacgactttctccgtttgtctgagcgatggcatctgttgtcgcaacgcctgcattagctgcacataatcgttatggctgctcaacagcggcacgcccagcgtcaggcgagtgaataacggacgcaagagttgtacttcacggacaattttttcatattcgtcgccgttaataatgtgcaacgactgaatcgccacgtcctgatatccctgtgcggcaagcttttgcaaagcctgtaatggcgtatcgatgtcgataccgtcacgctggcgaagcttgcgaatgatcattccggaagtgaaggcgcgaaacaggtcgcgatcgggacaggacgccgccagatcacgttcgcacgccacaatgtttttttcacaggtgtcgtgatagctggtgccaaaactgaccaccagaagcgcttttttcatttttactccttagctgcggccagccagcgcgataaacgctgcgcaaaggcggcctggctttccagtaactcatcacccgtcacaagcggcgtcgggcgcgcaataacgatgcaaggaatgcccgcatccagacagggctgaactttttcctgatatcccccctccgcgccggacgctttggtaatgaccacgtcggcccggcactggtggtaaaacgcggcgttaaaatcagcgctgaacggcccacacagagcgaaaatttctccaacgccgaaccccagttcgctgcagcgttgaatcacctccgccacgggcagtacgcgcgccagcaacgttttttccgccagcccggcacgccagacggccagatctttactgccggtcgtcagtaacacgcgcggaccaaaacgcctcgctatctcgcaggcatcggcaatactgcgcgccgtatagagaagcggatgcgtcagattgctaagctgctccggacgctgataacgacttaacaacacgcctgccgtttcacaggcgcgaaggaggttatggctgaccatttctgcataaggatgcgatgcatctattacccagcgagtacggttttcttttagccaggcgaccatctgcccgtactccagacgaccacagcgcacctgccctttaatgtcgcccgccagcgcttttccggctggcgtcgccacggataaggtgtacgcgacgttcgccgcatccagttgtcggcataacgcgcgcgcatcgctggtgccgcccaccaccagcacatccccctcattcacagcgtgtaacctcgcggcgttatcatcagcccatcctgaacataggtcgttttattaccaacgatgaccagactggtcatatctaccggttcaaaatccatatcgccgagcgtagtcagccatttttcctctttcttacgtccggcggatttcaccacgccaaccggcgtttgcgcgcttttactggcggcaagcaggtcaaacgcgcgcgccagatgcccttcgcggccgcggctgcgcgggttgtaaaaacagataacaaagtctgcctctccggcggcaacaatacgtttttcaattaccggccacggggtcagcaggtcgctgaggctgatatgacagaagtcgtgcatcagcggcgcacccagcagcgaggcggctgcgatactggcggtcatccccggaataaggcgaacctctacatccagcttctgcttgctcaccagctccagcaccagtcccgccatgccgtaaataccggcgtcgccgctgctaatcagcgccacgttatgcccggcctgcgccagctcaatcgccgcctggcagcgttcaatctctctgcacatcccggttttgatcacctgcttatcgccggtaaaggctttcaccaggtgggtgtaggttttataaccgacgacgatttccgccgcctgaagcgcctcaatcgcctccatcgtcatcattgcctgcgaaccggggccaataccaattacgctcaacatcagtgtgcaactcctaaagtaatagtgacgccctgttctcgcagggtctcgcctaacaattgtccctggcttaataaccacgctgccgggccggatacgctgccaacgcccaccgtttttctgacgaagccagaaccgggaaaatggtgttcgaattcgcgtaacgcttcggcggtaaaggttttaaaaggcacgcggcagcaggaggcgagctgaataagccccggctccccttttttgagcgtgacgctgccaatcgcttttaacgccagcggatcgagtttctgcgcttcaagctggcgcgccagtaatgtcgctaacaggggaaatggcgtatcgcggcggcagccaattcccgccaccacgcgctggggcaccagtttccagtgcggtacgggaagctcagggaggtcattacgcaaagagacgcagataagcgcatccagttcaggcagccgctgcaaatcatcaacagggataaaaccgcgaatatcacactggccgatctcttccgttagttcggcatcccaccataaccccacacgttgatgactgaccaacatctggttaacggtttttaccgccgttcgaagatcggacatgcgggcgttaagctggaaagctaaggtgtccaacgcggacatctcattgacatccgttgccgtggtaatcaccggatcggcgcctaacattcctgccaggtagcgcgtcaaggcattggccccgcccgcatgaccggaaagcaggctaatgacatgctgacctcgttcatcaatgacgaccaccgccggatcgctgaacttgtcgttcactaacggcgccaggacacgaacggcaatgccggtcgcgccgataaaaataagcgcggtataagtggtaaaagcctgccgggcggtattagcgaatccgccatcgaagggaataaatccctcttcccgcagtttttcactggtaaagcaggttaacggcagcatcgcggcgagtctctttgccagcgccacgccgccgggcgtcaggcaaaacaacgcaatggattcaggctttacggtattcatggctaaagtccgctgcataaagtcttgagtagtgatactccttacccagaaaattcccgaccaggattagcgccgtcttacggatgccagcatcacgtactttgtcgctaatatccgctaacgtgccgcgaacggtctgactttccggccaggtagccttataaatgaccgcgacaggcgtagttgccggataaccgccggcaatgagacgttccgccacccggtgaatacgctgaacggagagataaatcgccatcgacgtctggtgactggcgaacgcctccagttgttcgcgcgccggtactggcgtacgcccttccagacgggtaataatgagactctgcgatacctccggtacggtatattccacacccagctccgccgcagcgccgagaaacgcgctgacgccaggcactacctgccagtcgataccacggcgagttaactcctcgccttgctcacgtacggagccgtacagcgagacatcgcccgtttgcaaacgcaccaccgtttttcccgccttcacgcccgccgccatcagctcgataatctgctcaagatgcagttcggcgctgtcgtagcgttctgcctgcgcggggcagtaatccagcagttcggtattgatcagcgaaccggcatagataactacctgcgcctgttgcagcaggcggtagcctttaagcgtgatcagctcgcgatcgcccggcccggcgccgacgaaccatacacagcgtggatcaaatgtctctgacatggttttcttccttctgacaggcgataacaaaaacaggattgttcggtttgaaatagtgccccgcccccagcggcgttaacgatgaaagctgaagctgtacacagtccattcgacatgcgccgatgtgcgcaagatgcgccagcgcgctatgaaggttttcctgcaagataaaggtcatcaccagacggccaccgggatgcagatggcccatcgcccagtcaatcagcgccgtcagatgtccgccgctgccgcccataaacaccgcatcggctttcccggttatggtcattggcgcttcgccggggagaatatcgatattgccgcaggcaaagcgctgacgattctcatcaagcagccgtagtgcggcaggattacgctcgatagccgtcacctgcaacgaaggaaattgcagcgccgcttcaattgagacgcttcccgttcccgccccgacgtcaatcaggtgactggcgcggtggagctcaagtttcgacagtgccagcgcccgtaccgcctctttggtcattggcacgttctcgccgcgcagaaaaagctcatctttcatcaaggatcaccactgcattcatttcatagtcggcgttgaccgcactgacgggtagccagtggatccgctcattttccatcgccagattttcaccaatcaccattaagcgatgccctttgccccgcgcgaccagttcccgcgcgatttctcgcggcccgcagcgggcatccgtgaccatcgccactttgcgatggttcgctaactgctcgaagctgacgcaacgaccgtggctactggtcaaccacatgtcattcatatcaattccagcctgtgcgcacagatactgtacggcgctgatgccagggataatgcgaacctgttcgataccaaaatgcgccaccaggcgtgtaccgatgccataaaacagcggatcgccggaggccagcaccacgatccctttatcccgacgggcggcaatccatgacaacaacgcgccaatatccgcgcccagcgtaaatcgttcgccgccaaacgccggaaactgcgccaaatgccgtttaccgcctgccagcgcatcggcgtggtctatcgcttccagcgccgcaggcgtcatcaaatgccgtccagcgggccccattcccacgaccgttagcattgcagctccttagcaatctcgtcgacgggacgattactgccgagaatatggttatcaaaagaaaacaggatggcgtcgcagacaggcggcgttttggtaaaacgcagcatctgcatgactcgcaaacaaatacgcctggcaagatggttatagatatgcccgaagccatatgcttcaatgtgctccattgccgcttcggtggtatcgcaatcgctgaccagggtgagtaactccagcggcgcgcccagtaaagctaaatgcgcgaccagcgtttccatgcgcgcatcggcaatatggctatgggtatgaaagatcccggcggcgattttgatcaattttccaggatgacccaccagcactatctggcaaaatcccagccgtaccgcctcttcaatcatgtagccgacaaaattgctcatggtgacgactgcctgtgtgtcgacgcccatttgttcgcgaacaaaccgttcgccgtggttgcccggcacgagtatcacccgcgttaatcctgacgcccgtttgatctccagttccagcgatagcgagcgtttccagctttcttccgacatcggcgtcacaatgccggtagtgccaataatggaaatgccgccaagaatgccaagccgcgagttatacgttttttgcgcccgcgcttcgccttccggggcaaaaatctccacatcggccccacgcgccgggcctatcgcttcgcgcaccgctgactcaatggtatggcgcggcgtacgattgatggcggcgctcccgagcggcagtccaatccctttacgcgttaccgtaccaataccttcgccgccagtgagcgtaatctcaccgctgtcgttgagcgtaacgcgggcaaaaatcagcattccgtgcgtggcatccacgtcatcgccgccatctttacgaattgcggctatcgcctgctggccttcaatgtgcggcgactccacgttcaggcatagcgtgacgcccgacggcgtgacgatggagacctgatgaatcagatgttgacgtaataccatcagcgcggcgacttttgccgccgccgtcgcgcaggaaccggtggtatatcctttacgtaacgctttaccgtggtgccagaccggcgcgtcaaaagaaagctcgctcatcaggcctcccggaggtgatagagcaacgcattgacgatagcggcagccacgttactgccgcctttacgccctaacgcggcaaccgcggggaaatggctatgggtgagtgcctctttggactccgccgcgccgacaaagcctaccggtacgcccaccacgccgctcaccgtcacgttatgttcaagcaaacggaacagggccgtcggcgcattaccgaaaacaaagagcttgtttttctcctcctcggcgatagcgatatcgacggcggccattgaacgggtaatcccctgcgtttgtgcggcgcgcaccacgcgcggatcgctgatataacagcgacactcgccgccaaacgtcgccagtaatcttttattaatgccggacagcgccatcgtggtatcggtataaataatgcacggatggcgtaacgcatcacaaagctgctccagcgcatcggcagagaaccacaaaatgtccagccagtcgaaatcggcggtggtatgaataacccgcttgataatggcctcatggagcggactggcgaaacggtaatcaggacgcgtttcgcgaataatgtcgctaataatggtgaaactgttggcctcaatggtttggggctgctggatataatgcatactgtcgtcctcaggccacgccagataacccgcaccgcgccgcaattaacagcgccagcgccagggttgaagcgacccacatcaatcgaatcgttcgggaaatatcgtccacggaaatatcgcgctgcgcgtcgcctatccagggcttgtccacacgctcgccaaagtagttatttgggccaccgagctggattcctaaggcgccggccacacacgcttccgaccaggcgcaatttgggctactgtggttataacggtcacgccagccaatacgcagcgcccgccaaccactcaggcgacacagtcctgccgcaatgcccagcaacagccagctcagtcgggcaggaagatagttcgctacgtcgtccatacgggcgctgaccataccaatcgcccggtatttttcatgtttgtagcccaccattgaatccagggtattgacggctttgtaggccatcgccagcggcgcgccgccgagaaagaggaaaaagagcggcgcgataatgccgtcaacggtgttttctgcaaccgtttccaccacggcgcgattgatctgcgctggctgaagttgcgacgtatcgcgcccgacgatccaggagagttttattcggctttccgcaaggtcgttcttccgtaacggtcgttcaacctcctgcgcggcgtgggccagagagcgtccggccagcgtggtaaagatcatccagacttcgacgctccagccaaaccaggggtgaatccgctgcgccagcgccagtacgccccatgccacgccccaggtcgccccgacaaccacaacccacattacgccgccgccaatccgcagcgctttatcgccgggacaatagcgacgcacaatacgctgcacaaacgtgattaaacgacctatccagcgtaccggatggggccagtgttgagggtcgccgatgataaaatccagcacccaggcgatacaccaggcaagaatcgtcataatacgcgcctcgccgccgccagccagtgctgcaacatttccggacgctgggcgaaatggacgtgcagatagctggcaaacgtgttgcctgtctgccagccgccagtccattcctgtaacacgcggccatcgcgaaccttacgacaggccataacggcgggtgtttcggggataaaatctgagtagtgaaattcatggccgcgcactatctcgccaggcgccgccaatagcgttggctgcatagcctgcgcctcacaataaccaaagcgggtgagtcgcttacccattttgctgtgaccggggataatattcgccatctgatgaatttccccgccgctatcctccagagtgctccccagatacatcagaccaccacactccgcgtaaatcgccacgccgcgctgatgcgccgcccgcaaatgttttaacatcaccgtatttgccgccagatccgcggcgtataattcaggatatccaccgcccagccagatcatctgacaatcaggcaatgcgcggtcatgcagtgggctaaaacgcacaatgttaacgccggcacgctccagcaaatcgatgttatcgggataataaaagttaaaggcctcatcatccgccagagcaagcgtcagccctgcccccgctgtgttatcggggcgttcaggccacattcccgccggaagcgcggataacacgctcagcgagagtagcgcatccacatccactgtttgttccagcgtggcggcaaaatcatgccatgattgctgattgacgagggattctctggcagtaatcaaccccaggtggcgttcaggtaatgcgacgccgtcgcaaggagggacataccccagtaccggcagtgagcaataatgttcaatggcatttttgaggagctgatagtgggcgtcgctagtgacgcgattcacaatcacgcccgcgaggttgagggtcgggtcgaagtgctgaaatcccataacggtagccgcaagcgacgttgaaacagccttgccgtccaccagtaggatgaccgggcaaccaagctgtttggccatcgcggctgtgctgcagtaattggggtcgacgccatagccgtcatacaaccccatgaccccttcaatgacagcgatatccgcctgccgcatttgttcgcaaaataaggcgttgagaacaggaggaggaagcatgaaactgtcaagattacgggacgccacgccacagatagcggtatgccagccggtatcaaggtaatctggcccaactttaaacggctgtacgcgcagcgcgcgtttttgcagcagcctcaacaaaccaagcgtcaccgtggttttgccgcaaccgcttcctgtgcctgcaagaataaatgcgtgatgccttgccgccattaccctgatcctgttcagggtggtaggggtatacaggtacgcgcatgttcagtctttcgactgtacgcgtcttcgcaacccacttcccaccgaagttgttggttatcaccgacaggcaggtcttctggcttagcgtcctcctcgcccgtccttcccaatcttgcgatcagtggtctttacggggtcgtcagcatcacagcagcgggggctgcgggggattttcacccccttccctaccacaaatgtggcaaacctgttggtttacgttatggctgtacggcacacccataacgacaattaataatgtgctacgttttacatttctgtgagcaatagcctgagcggttgctcatctgacgttaatctactcatccttaccggtatattgacgataaaacgtatcgacaaagcgtaataaaacttatctttcctgacactgtacttcatcacaaaaataaaaactggtgcagtttatgccctaaattttattattttgttgcgctatgacaatttattgttacaccagataaattttctttctgaaatgattaagatacaaaagactatcaaaaatcggcaatagcaaaatattgctattcataacgatggaggatgagaattctcatttatctgctggcgataagcctgcggcgtaacctgataggtctggcggaagactttgcaaaaatagctggtttgcgaaaagcctaaattacgcgcaatactggcaatactccagtcactatggcaaagcaattctctggcgctaaccattctctggcggtttacccacgcattaaatccgattccctgatatttcttgaatagcttactgaagtaataggggctgagatagacatgtgaggcgacatcctcaagacgaagatcgtcggacaaatgcgcatcaatatagcgaagcgcttttttcattttactgtcatgcggagtgggaccacgagtggttttatttgcctccgattgctgcggattgtctttgataaccacgaaattgagctgttttttcaggcaattctcaacaatcagtttaagaagatcggcggaagcgataacgcgtgaatagtccatctctggcacattccgaaattcattcaagagctcagggtcagcctgccagcgatcgtcaacattaagaatgtttaccagctccacgtcattacttaaacgaacctgcccgcataaaacaaagccaactaaatgccctgcgattaccagcggaatagaaaaatccgttagaccggcatgacaacgataaatacagggttgatcggacttcgatgcctccagtcccccgcagcgatcgctcatacgacaacgtgtactatgctggggatgctgccgcatcaactgacaaaacggcgtgaaattgaatagctcagatatttcatcaccatgaatattgacaaccacaaccgccagaccggtggcttgtgcaaaatcctgtgcgattttattaatgagttctgagttcagagcgctcgcagaaatcatgataaaacccctcagttaatttattgttataaacaaaacacattatttacattcactttttattaccattatcctggccctgataaaaagtacaatgacaatatcaaaagtctcccattgctgggagacgttttgatcagttcgtgaaagcagatcacgaaattatctcacctgtttttacgatacatcattgctgtgaatctggttcgcatttccttacagttcacagcggttacaaggtaaattcttaccaataaaatagcgatatatggctgctccggcacaggcgccgataacaggcgcgacaatcggcacgataaaataagggatctctcgcccaccgctcatcgccatgttcccccaccccgctaaccatgtgaacagtttgggaccgaaatcacgcgccgggttcattgcaaaaccggtaaggggtccagtagacgcgccgataacggcaaccagtatcccaataagcaaaggcgcaagcggccctttaggaatgccattgccatcatccgtcaatgccatgatcatgcccatcagaatcgacgtaatgaccacttccaccaacgcagcctgccatacatttagcgctgcggccggataggtactgaaaatgctggctaattgcaaactttcgacgctaccgcgcaccatatgatgcgcagtctcaaattcagtaaaaaggctactataaagcacatacgccagcagagcgccgccaaaagcgccggcaaactgggcaataatataaggcaatactttctgtttggggaagcaggcaaacagccacagcgcaatcgtcaccgcagggttaagatgtccgccggagattccggcagtaaggtaaacggccagtgaaattccaagcccccaaataatgcaaatctcccataatccgaggctggcgcctgcgactttgagcgcgctcaaacaaccgataccaaaaaacaaaaagagtccggtgcctaaaaattccgcaccacattgcgcctttagagaatcattcatgtgacaccttctgagcaaagttcgtgtcctggccagcgcaagtttcggctggcggtagagtacagctaacctcactataaaaagtgccgcctgtaaattgttggcaacctgcgaacctgtctcccggaaaaatcgtgttgcgatagcaaaattttgcttttccgatatttttagcagcccatcatacgggagattcgagctataaaatacgcctgtgaaaataataaaatattgcacaagccaacttatcaatttcgaataagcatcacattttgcgtctttcgccatatcaaataaaaatactctcgtcactaacaaaaatgtaaaaatgaaataataaaaacaaaataatcatatagacaataataaattaaatgtaatttatcaataagttataaaagcaaaagacaatttagtcatattgctttcccattattttctgatgctcaacagcaagtcagccattctttttcctcgcatcttcttatagtcccaactatcggaacactccatgcgaggtctttatgcaacaagaagcactaggaatggtagaaaccaaaggcttaaccgcagccatagaggccgctgatgcaatggttaagtcagccaatgtgatgttagtgggctatgaaaagattggctccgggctggtaaccgtcatcgtgcgcggcgatgttggcgcggtcaaagcggccaccgatgcaggtgccgcagccgcacgcaacgtgggtgaagtgaaagccgtacacgtcatcccacgccctcacaccgatgtagaaaaaatcttaccgaagggaattagccaatgagcagcaatgagctggtggaacagatcatggcgcaggtgattgcccgtgtggcaacgccggaacaacaggccatccctggtcaaccccaacctatacgagagacggctatggcagaaaaaagctgcagtttaacggaatttgtcgggaccgccattggcgataccctgggcctggttatcgccaacgtcgataccgccctgctggacgcgatgaaacttgagaagcgctatcgttccatcggcattctcggcgcccgcaccggcgcaggcccgcacattatggcggcggacgaagcggtgaaagccaccaacaccgaagtggtcagcattgagctgccgcgcgataccaaaggcggcgcgggccacggttcgctgattattttaggcggtaacgacgtttccgacgtcaagcgcggtatcgaagtcgcgctgaaagagctggaccgcaccttcggtgatgtttacggcaacgaagccggacatatcgagctgcagtacaccgctcgcgccagctatgcgctggaaaaagcgttcggcgcgccgattggccgcgcctgcggcattatcgtcggcgctccggcttccgtcggcgtactgatggccgataccgcgctgaagtcagccaacgttgaagtcgtggcgtacagctctccggcgcacggcaccagctttagtaacgaagctattctggtgatttccggcgactccggcgcggtccgtcaggcggtgacctccgcccgcgaaatcggcaaaaccgtccttgcgaccctcggttctgaaccgaaaaacgatcgtccgtcctacatctgatacccacgaggctgattcatgagatcgaaaagatttgaagcactggcgaaacgccctgtgaatcaggacggctttgttaaggagtggatcgaagaaggctttatcgcgatggaaagcccgaacgacccaaaaccgtcgataaaaatcgttaacggcgcggtaaccgagctggacggaaaaccggttagcgaattcgacctgatcgaccactttatcgcccgctacggcatcaacctgaaccgcgccgaagaagtgatggcgatggattcggtcaagctggctaacatgctgtgcgatccgaacgtcaagcgcagcgaaatcgttccgctaaccaccgcgatgaccccagcgaaaattgtcgaagtggtttcgcatatgaacgtggttgagatgatgatggcgatgcagaaaatgcgcgcccgccgtactccatctcaacaggcgcacgtcaccaacgttaaagacaacccggtgcaaattgccgccgatgccgccgaaggcgcatggcgcgggtttgacgaacaagagacgacggttgcggtagcgcgctatgcgccgttcaacgccatcgcgctgctggttggttctcaggtaggtcgtccgggggtactgactcaatgctcgctggaagaagccaccgagctgaagctcggcatgctgggccacacctgctacgccgaaaccatctccgtttacggcaccgagccggtcttcaccgacggtgacgataccccatggtcgaagggcttcttagcctcttcctacgcctctcgcggcctgaaaatgcgcttcacctccggctccggctccgaagtgcagatgggctacgccgaaggcaaatccatgctgtatctggaagcgcgctgcatctatatcaccaaagccgcgggcgttcaggggctgcaaaacggctccgtaagctgcatcggcgtaccgtctgccgtgccgtcaggcattcgtgccgtgctggcggaaaacctgatctgctcttcgctggatctggaatgcgcctccagtaacgaccagaccttcacccactccgatatgcgtcgtaccgctcgcctgctgatgcagttcctgccgggtaccgactttatctcctccggttattccgcggtgccgaactacgacaacatgttcgccggttccaacgaagatgcggaagactttgacgactacaacgttatccagcgtgacctgaaagtggacggcggtctgcgcccggttcgcgaagaggacgttatcgccatccgtaacaaagccgcccgcgcgctgcaggccgtgtttgccggaatgggactgccgccgattaccgatgaagaagttgaagccgcgacctatgcccacggttcgaaagatatgccggagcgcaacatcgtcgaagacatcaagttcgcccaggaaatcatcaataaaaaccgcaacggtctggaagttgtgaaagcgctggctcagggcgggtttaccgacgtggcccaggacatgctcaacatccagaaagccaagctaaccggcgactatttgcacacctccgccattatcgtcggcgacggacaagtgctctctgcggttaatgacgtcaatgactatgccggtccggcaacaggttatcgcctgcagggagaacgctgggaagagattaaaaacatccctggcgctcttgatcccaacgagattgattaaggggtgagaaatggaaattaatgaaaaattgctgcgccagataattgaagacgtactccgcgatatgaagggcagcgataaacccgtctcgtttaatgcgcctgcggcatccacagcaccacagaccgctgcgcctgcgggcgacggctttctgaccgaagtgggcgaagcgcgccagggcactcagcaggacgaagtcattatcgccgtcggcccggcatttggcctggcgcaaaccgtcaatatcgtcggcttaccgcataagagcattctgcgcgaagtcattgccggtattgaagaagaaggcatcaaggcgcgcgtgattcgctgctttaaatcttccgacgtggcgttcgtcgccgttgaaggtaaccgcctgagcggatccggcatctccatcggcatccagtcgaaaggtactacggttatccaccagcaggggctaccgccgctctccaacctggagctgttcccgcaggcaccgctgctgacgctggaaacctaccgtcagattggtaaaaacgccgcccgctatgcgaaacgagaatcaccgcagccggtccctacgctcaatgaccagatggcacgcccgaagtaccaggcaaagtcggccattttgcatattaaagagaccaagtacgtcgtgacgggcaaaaacccgcaggaactgcgcgtggcgctttgataaaggataactccatgaataccgacgcaattgaatcgatggtccgggacgtattgagccgcatgaacagcctgcagggcgatgcgccagcagcggctcctgcggcaggcggcacgtcccgcagcgcaaaggtcagcgactacccgctggcgaacaaacacccggaatgggtgaaaaccgccaccaataaaacgctggacgactttacgctggaaaacgtgctgagcaataaagtcaccgctcaggatatgcgtattaccccggaaaccctgcgcttacaggcctctatcgccaaagatgcgggtcgcgaccggctggcgatgaacttcgaacgcgccgccgaactgaccgcggtaccggacgatcgcattcttgaaatctacaacgcccttcgtccgtatcgttcaacgaaagaagagctgctcgctatcgccgacgatctcgaaaaccgttatcaggcaaagatttgcgcagctttcgttcgtgaagcggcagggctgtacgttgagcgtaaaaaactcaaaggcgacgattaaggatttcgtatgcgatatatagctggcattgacatcggtaactcatcaacggaagtcgcactggcgcggcaagatgagactggcgcactgacgattacacacagcgcgctggcggaaaccaccgggatcaaaggcacgttgcgtaacgtgttcggcattcaggaagcgctcgccctcgtcgcaaagcgcgcggggatcaatgtcagagatatttcgctcatccgcattaacgaagccacgccggtgattggcgatgtggcgatggaaaccattaccgaaaccatcatcaccgaatcgacaatgatcggccataacccaaaaacgccgggcggagcaggccttggtgtgggtatcacgattacgccggaggagctgttaacccgcccggcggactcgtcctatattctggtggtatcgtcagcctttgattttgctgatatcgccaatgttatcaacgcctcaatgcgcgccggataccagattaccggcgtcattttgcagcgcgacgatggcgtactggtcagcaaccggctggaaaaatcgctaccgattgtcgatgaagttctgtacatcgaccgcattccgctggggatgctggcggcgattgaagtcgccgtgccgggaaaggttatcgaaaccctctctaacccttacggcatcgccaccgtatttaatctcaacgccgatgagacaaaaaacatcgtcccgatggcgcgcgcgctgattggcaaccgttccgccgtggtggttaaaacgccatccggcgacgtcaaagcgcgcgcaatacccgccggtaacctggagctgcaggctcagggtcgtaccgtgcgcgtggatgttgccgccggtgccgaagccatcatgaaagcggtggacggttgcggcaagctcgacaacgtcaccggcgaggccgggaccaatatcggcggcatgctggagcacgtgcgccagaccatggccgaactgaccaacaagccgagcagtgagattttcattcaggatctactggccgttgacacctcggttccggtgagcgtcaccggcggtctggccggggagttctcgctggagcaggccgtcggcatcgcctcgatggtgaaatcagaccgtctgcagatggcgatgattgcccgtgaaattgagcagaagcttaatatcgacgtgcagatcggcggcgctgaggctgaagccgccattctgggcgcgctgaccacgccgggtaccacccgaccgctggcgatcctcgacctcggcgcgggctccaccgatgcctccatcatcaaccctaaaggcgaaatcatcgccacccatctcgccggggcaggcgacatggtcacgatgattattgcccgcgaactggggctggaagaccgctatctggcggaagagatcaaaaaatacccgctggctaaggtcgaaagcctgttccacttacgccacgaggacggcagcgtccagttcttcccgacgccgctgcctcccgccgtgttcgcccgcgtctgcgtggtgaaaccggacgaactggtgccgcttcccggcgacttagcgctggaaaaagtgcgcgccattcgccgcagcgctaaagaacgcgtctttgtcaccaacgccctgcgcgcgctgcgccaggtcagtccaaccggcaacattcgcgatattccgttcgtggtgctggtcggcggctcgtcgctggatttcgaagttccgcagctggtcaccgatgcgctggcgcactaccgcctggtcgccgggcgaggaaatattcgcggcagcgaaggcccaagaaacgcggtggccaccggcctgattctctcctggcataaggagtttgcgcatggacagtaatcacagcgccccggctatcgtcattaccgttatcaacgactgcgccagcctctggcacgaagtgctgctgggcattgaagaggaaggcatccctttcctgcttcagcatcacccggctggagatatcgttgacagcgcctggcaggcggcgcgcagctcgccgctgctggtcggcattgcctgcgatcgacactcgctggtcgtgcattacaagaatttacccgcatcggcgccgctttttacgctgatgcatcatcaggacagtcaggcccaacgcaacaccggtaataacgcggcacggctggtcaaagggatcccctttcgggatctccatgcttaatcacaggagaacggcagtatgaataacgcactgggactggttgaaacaaaagggctggtcggcgccattgaagccgccgatgcaatggttaaatccgccaacgtacagctggtgggctacgaaaaaattggttctggcctggtgaccgtcatggttcgcggcgatgtcggcgcggttaaagcagccgtagatgccggcagcgcagcggcaagcgtcgtgggtgaagtgaaatcctgccacgttatcccgcgtccgcacagcgatgttgaggccattttaccgaaatcagcctaatcgatggcgaataaggagcaccgcgtgaagcaatcactgggattacttgaagtttgtggtctggcactggctatcagctgcgccgatatcatggcgaaatccgcttctatcacgctgctcgccctcgaaaagaccaatggttcaggctggatggtgattaaaattaccggtgatgtggcctccgttcaggcggctatcaccaccggtgcgcatttcgccgaacagcggaatggcctggtggcccacaaggttatcgccaggcccggagaagggatcctgctcgcagagacaccctccccctccgtcattgaacctgagcctgaagcgtcagagatagctgatgtcgtttctgaagcgccagccgaagaggccccgcaggaatcagaactggtcagctgcaatctgtgtctggatccaaaatgtccgcgccagaagggcgaacctcgtacgctttgcattcattccggcaagcgaggtgaagcgtaatggataaagagcttctgcaatcaacggtccgtaaagttctcgacgagatgcgccagcggcctattccgctgggcgtctcaaaccgtcatatccacctgtccgcacaggattatgagcggctgtttcccggccatcccatcagcgagaaaaaagcgctgctgcagccgggacaatacgccgcggagcaaaccgtcactctggtgggaccgaaagggcagctcaaaaatgtgcgcctgctcggcccgctgcgctcggtaagccaggtggaaatttcgcgtaccgatgcgagaacgctggggattgccgcgccgctgagaatgtccggcaacctgaaggggacgccgggcatccgcctggtcagcccctttgccgaactggagctgccttccggggttatcgtcgcgcagcggcatatccatatgtcgccgcttgatgcgctgatcctgcgggtttcccacggcgatatggtctccgtggcgattgaaggcgacgatcgcgggctgattttcaacaacgtggcgattcgcgtttcaccggacatgcgcctcgaaatgcacattgataccgatgaagccaacgccgctggtgccgataacccgcatgcctttgcccggctggtaggcccgcgatgaacggcgaaaccctgcagcgcattgtcgaggagattgtctcccggctgcatcgccgtgcccagagcacggcgacgctgagcgttacgcaacttcgcgatgccgactgtccagcactgttctgtcagcacgcgtcgctgcgcatcctgctcatcgacctgccgctgctgggtcagcttgcggatgcagaaaccggcgatgccgccgcccggaaaattcacgacgcgctggcgtttggcatccgcgtacagctcagcctgcacagccagctgctgccggttatcccggtaaaaaaactggctcgtctgccgctggtattcaccgatgagcacggactgccgctggttctgcatgcgggttcggtgctgagctatcgcgatgtcgcgctgctaagccgggggcgtgtggttgtccaccgcaaatgcatcgtgaccgccatggcgcgtgacgcggccaatgcgcggaatattcaattaattaagcaggagtaaatcatgcatctggcacgagtcacgggcgcggttgtctccacgcaaaaatcaccttctttgattgggaaaaagctgctgctggtgcgtcgggtcagcgccgatggcgaactccccgcctcgcccacctccggcgatgaagtggccgtggactccgtcggcgcgggcgtcggcgaactggttttgctcagcggcggctccagcgccaggcacgttttttccgggccaaatgaggccattgacctcgccgttgtcggcattgtagatacgctttcgtgttaaggggcggttatggcgatttatacccgaacaggtgacgctggcaccacatcactgtttaccggccagcgggtgagcaaaacccacccgcgggttgaagcctacggcacgctggatgagctgaacgccgcgctgagcctgtgcgcctgcgccgctgcggatgaaaaccaccgcaccttactcgaggccatccagcagcaacttttttggtttagcgcagagctggccagcgacagcgagcagccatcgcccaaacagcgctacatcagcagcgaagagatttcggccctggaagccgctatcgatcgggcgatggcccgcgtcgaaccgctgcacagctttattttacccggacgctgcgaagccgcgagccgcttacattttgcccgcacgctggcgcgccgcgccgaacgccgtctggttgaactggcaactgaagtcaacgtacgtcaggtgctgatgcgctatatcaaccgcttatcggactgcctgtacgccctggcccgcgcggaagatagcgatgcgcaccaggccaacatcatccgtgaagttagcaagcgctatctggctgcctgccagccgccccacagcaaggagacgacgccagtggccctctcattccacgatctgcaccagctcacccgcgccgccgttgaacgcgcgcagcaactgcaggttccggtagtcgtcagcatcgttgacgcgcacggcacggaaactgtgacctggcggatgccggacgccctgctggtcagcagcgagctggcgccgaaaaaggcctggaccgcagtggcgatgaaaacggcgacccatgagctgagcgatgtcgttcagccgggcgccgcgctttacggtctggaaagtcatttacagggaaaagtggtcacctttggcggcggttacgccctgtggcgcgacggcatattaattgggggtcttggcatcagcggcggcagcgttgagcaggacatggacatagcacagaccgccatcgcggctattaacgtgggaactcatcaatgaatacttctgaactcgaaaccctgattcgcaccattcttagcgagcaattaaccacgccggcgcaaacgccggtccagcctcagggcaaagggattttccagtccgtgagcgaggccatcgacgccgcgcaccaggcgttcttacgttatcagcagtgcccgctaaaaacccgcagcgccattatcagcgcgatgcgtcaggagctgacgccgctgctggcgcccctggcggaagagagcgccaatgaaacggggatgggcaacaaagaagataaatttctcaaaaacaaggctgcgctggacaacacgccgggcgtagaagatctcaccaccaccgcgctgaccggcgacggcggcatggtgctgtttgaatactcaccgtttggcgttatcggttcggtcgccccaagcaccaacccgacggaaaccatcatcaacaacagtatcagcatgctggcggcgggcaacagtatctactttagcccgcatccgggagcgaaaaaggtctctctgaagctgattagcctgattgaagagattgccttccgctgctgcggcatccgcaatctggtggtgaccgtggcggaacccaccttcgaagcgacccagcagatgatggcccacccgcgaatcgcagtactggccattaccggcggcccgggcattgtggcaatgggcatgaagagcggtaagaaggtgattggcgctggcgcgggtaacccgccctgcatcgttgatgaaacggcggacctggtgaaagcggcggaagatatcatcaacggcgcgtcattcgattacaacctgccctgcattgccgagaagagcctgatcgtagtggagagtgtcgccgaacgtctggtgcagcaaatgcaaaccttcggcgcgctgctgttaagccctgccgataccgacaaactccgcgccgtctgcctgcctgaaggccaggcgaataaaaaactggtcggcaagagcccatcggccatgctggaagccgccgggatcgctgtccctgcaaaagcgccgcgtctgctgattgcgctggttaacgctgacgatccgtgggtcaccagcgaacagttgatgccgatgctgccagtggtaaaagtcagcgatttcgatagcgcgctggcgctggccctgaaggttgaagaggggctgcatcataccgccattatgcactcgcagaacgtgtcacgcctgaacctcgcggcccgcacgctgcaaacctcgatattcgtcaaaaacggcccctcttatgccgggatcggcgtcggcggcgaaggctttaccaccttcactatcgccacaccaaccggtgaagggaccacgtcagcgcgtacttttgcccgttcccggcgctgcgtactgaccaacggcttttctattcgctaactgaggtcgcgatgaataccttctcactacaaacgcggttgtacagcggtcagggcagcctggcggtgctcaagcgctttaccaataagcacatctggataatctgcgatggctttctggcgcactctccgctgctggataccctgcgtaacgcgctgcccgcagataaccgcatcagcgtctttagcgagataacgccggaccccaccatccacacagtggttcagggcattgcgcaaatgcaggctctgcaaccgcaggtggtgatcggttttggcggcggctcggcaatggacgcggcgaaagcgattgtctggtttagccagcagagcgggatcaacatcgaaacctgcgtggcgatcccgaccaccagcggcaccggctcggaagtgaccagcgcctgcgtaattagcgacccggataaaggcatcaagtatccgctgttcaacaatgcgctgtatccggatatggcgatcctcgacccggagctggtggtcagcgtaccgccgcagattaccgccaacaccggcatggacgtgctgacccacgccctggaggcctgggtgtcaccgcgcgccagcgactttaccgacgcgctagcggaaaaagccgccaaactggtgttccagtatctgcccacggcggtggaaaaaggcgactgcgtggcgacgcgcgggaaaatgcacaatgcctcaacgctcgccgggatggccttcagccaggcggggctggggcttaaccacgcgatagcccaccagcttggcgggcagtttcatctgccgcatggcctggccaacgccctgctgttaaccacggttatccgttttaacgccggcgttccgcgcgccgccaaacgctacgcgcggctggccaaagcctgcggtttttgcccggcagaagccaatgatatcgcggcgatcaatgcgctgattcagcaaatcgaactgcttaagcaacgctgtgtccttccctcactggccgttgcgcttaaagaaggaagatccgacttttccgcacgcattccggcgatggtgcaggctgcgctggctgacgttacgctgcgcactaacccgcgcccggccaatgccgaagccattcgggaactgctggaggaactgctatgagcaccgccatcaacagcgttgaaatgtcccttagcgccgatgaaattcgcgagcgcgttcgcgcagcgggcgttgtcggcgcgggcggcgcaggttttcccgctcacgtcaaactacaggcgcaggtagagatttttctggtgaacgccgccgaatgtgaaccgatgctcaaagttgaccagcaactgatgtggcagcaagctgcgcgccttgtgcgcggcgtacagtacgccatgacggcaaccggcgcgcgcgaaggggtgatagccctgaaagaaaaataccgccgggccatcgacgccctcaccccactgctgccagacggtatccgcctgcatatcctgccggatgtatatccggcaggcgatgaggtgctgactatctggatggcaaccggtcgtcgggtcgccccggctgcgctaccggccagcgtcggcgtggtcgtcaataacgtgcaaacggtgctaaatattgcccgagcggtcgagcagcggtttccggtcactcgtcgcacgttgaccgtgaacggcgcggtcgccagaccgttgaccgttactgttcccatcggcatgtcgctgcgggaagtactggcgctggcgggcggcgcaacggtcgacgaccctggttttattaacggcggcccgatgatgggtggcctgattacctctcttgataatccggtgacgaaaactaccggcggcctgctggtgctccccaaaagccatccgcttatccagcggagaatgcaggacgagcgcacggtgctttccgtcgcgcgcaccgtctgcgaacagtgccgactgtgtaccgatctctgtccgcgacacctgatcggccacgaactctctccgcacctgctggtgcgggcggtgaactttcatcaggctgccacgccgcagctgctgctgagcgcccttacctgttcggaatgcaacgtttgcgaaagcgtggcctgtccggtggggatctcgccgatgcgcatcaaccgcatgttaaaacgcgagctacgggcgcaaaaccagcgctacgaagggccgctgaatccggccgacgagatggcgaaatatcgcctcgtgccggtgaagcggctgatcgccaaactgggactaagcccctggtaccaggaagcgccgctggttgaagaagaaccgtcagtagaaaaagtcactttgcagctgcgccagcatattggtgccagcgcggtagcgaacgttgcggtgggagaacgcgtgacgcgcgggcaatgcgttgctgatgtcccgcctggcgcgctcggcgcacccattcacgccagcatcgacggcgttgtatcggccatcagcgaacaggccatcactgttgtaagaggttaaccatgtctcaggctataggaattttagaactcaccagcatcgccaaaggcatggagcttggtgatgccatgctgaaaagcgccaacgtcgatctactggtcagcaagaccatctgtccggggaagtttttactgatgctgggcggcgatatcggcgctatccagcaggccattgaaaccggtacgtcgcaggccggcgagatgctcgtcgacagcctggtgctggcgaatattcatcccagcgtacttccggccatcagcagcctgaacagcgtcgataagcgccaggcggtaggtatcgtcgaaacctggagcgtggcggcctgcattagcgccgcagaccgggcggtgaaaggctcaaacgtcaccctggtgcgggtgcatatggccttcggtatcggcggtaaatgctacatggtggtggcgggcgacgtttctgacgtcaataacgccgtgacggttgccagcgaaagcgcgggcgagaaagggttgttggtttaccgttcggtgatcccacgcccgcatgaagccatgtggcgacagatggtggaggggtaatggaaagacaaccgacaacggatcgcatgattcaggaatacgtgccggggaaacaggtcactctcgcgcacctgattgctaatccagggaaagatctctttaagaagctgggcctgcaggatgcagtgtccgccattggcatccttaccatcacgccgagcgaagcatcgattatcgcctgcgatatcgccaccaaatccggcgcggtggaaattggttttctcgatcgctttaccggtgccgtggtgctgaccggcgacgtttctgccgtcgagtatgccctcaagcaggtaacgcgcacgctgggcgaaatgatgcagttcaccacttgctcgatcacccggacgtaaagtcatgaagcgtttgatgtttatcggccccagccagtgcggaaaaacctcgctgacccaaagcctgcgcggcgaagcgctccattataagaaaactcaggccattgaatggtcgccgatggccatcgatacgccgggcgaatatctggagaaccgctgcctgtacagcgccctgctgaccagcgcctgcgaggccgacgtcatcgccctggtgctgaatgccgacgcccagtggtcgcccttttctccgggttttaccgccccgatgaaccgcccgacgattggcctggtcaccaaggccgatctcgccgagccgcagcgtatttcgctggttgcggagtggcttacgcaggctggcgcacagcagatttttattaccagcgcgctgaataactcgggtctcgacgccgtgctggattttctgaattcgaaggaacctttatgtcttacaaaataatggccattaacgccggtagctcatcgttaaaatttcagctgctggagatgccgcagggcgacatgctctgtcaggggctgattgagcgtatcggtatggcagatgcgcaggtgacaattaagacgcacagccaaaaatggcaggaaaccgtccccgttgccgatcatcgcgatgcggtaacgctgcttctggaaaagctgctgggttatcaaatcattaacagtctgcgggacattgatggggtgggccatcgtgtggcgcacggcggtgagttttttaaagactcgacgctggtcacggatgaaacgttagcgcaaatcgaacgtcttgctgaactggccccgcttcacaacccggtaaacgcgttgggtattcacgtttttcgtcaactgttgcctgatgccccttccgtagccgtgtttgatacggcatttcaccagacgctggatgaacccgcctatatttacccgcttccctggcattattacgctgaactggggattcgccgttatggctttcatggcaccagccataagtatgtcagcggcgttctggcggaaaagctgggcgtaccactcagcgcattacgggtgatttgttgtcatcttggaaacggtagcagcatctgcgccatcaagaacgggcgttcggtcaatacgtcgatgggctttacgccgcagtcaggcgtgatgatgggcacccgtagcggagatattgatccctctattctgccgtggatagcccagcgcgaaagcaaaacgccgcaacagttgaatcagttattaaataatgagtcaggcttgctgggcgtttctggcgtgtcgtctgattaccgcgatgtcgaacaggcagccaataccggtaaccggcaggctaaactcgctctcactctgtttgccgaacgcattcgcgccaccattggcagctatattatgcaaatgggaggactggatgcgctggtattcactgggggcattggcgagaactcagcgcgcgccagatcggcggtgtgccataatttgcaatttttgggcttagccgttgatgaagagaaaaatcagcgtaatgcgacatttatccagacggagaacgccctggtgaaagtcgccgtcatcaacaccaacgaagagttaatgatcgcacaagacgttatgcgcattgcgctaccggccacggaagggctttgtgtaccagcctgagagggttatacgacgcattgcggcaagtcatggtaataacgcttttaccatgacactatgcgcgcacactattcgtacctgaaaggtgataatgtggctgttgcgcaatgccccgcctcatgcggggaacttatccagggatggattctgggcagtgagaaactggtctcctgccccgttgactggtacagcaccgtagcagtcacggctgcgccgccgttgataaacgagcgcccattgtcgcgggcgatggtggagcgcgttctggcgcactggcagtatcctgcgcactggagtaacgagattcgcgtcgatgtgcgttcgtcaattcccgttgccaaaggcatggccagcagcaccgcagatattgccgctacggcggtggcaacggcgcatcatcttggccattcgctggatgaaaccacccttgcacagctttgcgtctcaatcgaacccactgatagcaccgtttttcatcagttaacgctgtttgatcataataatgcggccacgcaaatcgcctgcgagccaccgccgccaatcgatttgctggtactggaaagcccggtcacactgcgcacgcaagattaccaccgtctccctcgccagcagaaattaatagcaagttcagcaaccttgcagcaggcctggaatctggtgcaggaagcctgtataacgcaaaatccgctccggctgggtgaggcggctacgcttagcgctatcgccagccagacgctgttacctaagccgggctttaccgccctgctgtcgctggtcgaagagtgtgatttatacggattgaacgtggcgcatagcggtagcgtggtgggtctgatgctggaccggaaacgtcatgatattgcgcgtctgaaaggtaagctggcagagaaaaaacttacccgacactggccaaaacaacatttactcaagatggtcactggcggggtcaaactgcagtgagagcctgatatacgctcccactgccgtagcgcattattcggcttttacatcggcgtgtttcatttcgcccatcgctttcagctttttggaaatgtcgcgacgctctttggagatttcggcatttttaatgatgtagtcatcaacgcgatcttcatagtcgcttttcatactggcgatgataccctgaatcgcctcaacgctcatacctggcttgatgtagtcgctcaggttgtccagcagcagcacacgcttctggttgtcacggatcttcttctcaatgtcctgaatttcacgctgcagtttatttttgcgacggaacagacgaacaaactccagcacgtcctggaaagaaggcttggttgtttccatttttacacccctgataatgtgagattcggattcgttaagcaactgctagtggataaacattacgtttatccccgtcatacttcaagccgccagaggaaacaccgttacgtcgccgtctggggaaacctgaaggttcggggataaaatcgttgccagtagcactcattttatccttatattagtatcatactcttaatctttgctgaatcgaagcagcaacaaattcattcgccccatctgctttttatttgcgcaaagcccggcagatcaaatgtgaaagcagttccaactgtcgggcagtttccatacttagccaaacatagccgtggataggggtttcagccaccgcgtcgccctgctgctcgttcattagctgccgcaactcggcagcaatatcattcagtttaccggtgtttgccagtaccggctgcgggttgccttcaaacaacgcgtgggcgatcgttagcaaggtttgctgcgtcatctgctgggtttcacgcaatgtgtgcgcgttaagcatcacaaaatggctggcgcgcgtcgcccagtgggcattgatttgtaattcaagcatacaaaccaggttgcggttgatggtctgaatggcctcgaaaatagatttttgtatccgggtttctttactggcaggcgttatcagcccgcgcattttgacgacatcgttcagcaaccgttgcaaatgtttatccaaccgggggcgctccagcaaattcggcgacagcgctgcctgatacacccgattatacgccgtgacgcaatgcgccagttggatgcgccagtgcaaaaaggcgcgctggggccagatgccggtaaacaacattgccagtagcgaccccaaaatcacatccccgccacgccataatgccgtatccatatcaccagcgggagcgccgacaacaacggcaagcgttatgcctatcagtagcgcctgatacggttttttccctaaggccagccagccgcacaaaaacatcgctatcgcacaccacaccagcatcagcggtaaggaaaagagctccaggcgtagcgccaccagccctaacgccgcgcccagaatcgtaccgcctatgcgctcaaaagcacgaggcactacatttccccagaatgagatgggccccataatcaccactaacgtgattagcggccatgtgccctcgggaatagaaaacagacgaaccagcagaaaggtaagaatgaacgccagggcgatacgtatgccatgcacgatgcgataatgacggtacaaccgtatttcaaaagggcttaatgacttatcggcacgcacgcttgcgctccttacgggaatggcaaaaaatgcattgtacctgctttatagcaaaaatagcgcactggcggacggaacacattatccgtccgctcttttcagccaggaaaccagtcgatcacttccgctgtaccggaatatacatttcaatatcccagtatccatcttccatgccgttattcagataggtttcaaaacagggcgcagaggctatctgataagcgctatcctgctcgaggacatcaaaaaaccgttcccacggcttcgcaaagtcacggtcttccactcgcgcgacagcagtggcatattcgccgccttcaatggcggtcacgattacgccttcgctattgtccggcaggatgaaattctctgccacggacaccacggtatcgcagcggagtttttctgcaggtacgacatctggattgtcgtaatagacggcaatccattcaactggcacgatccgctgtcgatccacccacgtcatcagttgttcaaaaccctgcttcacggtgtgttcccatggaccgaccatgtggaaaccggctatcttgcgtttttgttcctgcctgatttcgtaatccatgctgcctccgtcacttcacaatgctgtatgaatgtacagtataattacagccttttacggtcacaaggacagcgtgatcattttgtgagcaacctcgcaatcccgcccttttgacacctcagatgacggtgaacggtgtgtgtgacaacggcttacgctttatgctgaaaatagtcgctcagacgagagaacataccgcctttacccaccgattccagagtgaccagcggccactgagcgatcagtttatcccgatcgtagagctctatttcacctacctgttgatgagcggcgattggcgcctccagctcttttctatccagcacatattttgctttgatatgcggaatttccgctttaggcagcgccatccagaagtcctgttccgtacccagcgcaatcttttctttgtctccataccagattcgctcgctgcccacttttttaccgctgtgcaaaatctgcaccgtcgcaaagttttgctggccccactgcaacagttttcgcgcctgttcctcacgacctttcgaacttttcgcccccatcacaacggcgataagtcgacgctgcccgtccaccgccgatgcgataagattaaatcccgcccccgatgtgtgtccggttttaagcccatcgatatgcatggtcttatcccataacaagccgttacggttctgctgcgtgatgccgttccaggtcaggcttttctcgctgtacatgtgataaaattcaggctcgccgtgaataatcgcccgggagagtacggccaggtcatacgcggagctatgttgtcccggcgcatccagaccgtggacggtttcaaaatgggtatcctgtaaattgagttttttcacatagctgttcatcatcgccacaaactgcggctgcccgcccgcgatataatccgccagcgccacacaggcatcgttaccggaatccacgattaagccacggcttaaatcacgcaccgacacgcgatccccttcttttaaaaacatcaacgaggagccgacaaacaccggattatccttcgcccaggcgtcgcgcccaactgtgacgatatcgtcagggctgatacgatgactatcgatggcgcgatcgacgacgtagcccgtcattagcttggtaaggctggcgggattacgttgctggtgttcattaccggcggtaagaacctgtcccgtagtgtaatccatcaacacccaggcgcctgcatcaatggctggcggttggggagcaaaacttacggcatcggccgcaagcgcaggagaaaggtgcatcgcgaataaagaagcggcaataaacaaacggcgtttcaacagcatgtcctcaggatggtctctatttgccgttctttttacggaagttcagttaaacaaacatggataaattgcaagaaaatgtgacacaaggcacattttcttgctgacattattttatggatacgctcagacggcggacttatccccgcgcggcgcggtacgatgacgatgatagccgtcaaccatgctacggaaaatttgtcccggcgtgtcgccaagagtacacagatagagatgcgcgcaaataaacagtaagccgatgatagcaagcgccatatgcagcaccagcatcacagggcccagacccgcaacctgcggatagagacacagcaaaccggtgatgattaacagcggtaccagcgcgtacataatcgccagatatgccagttgttgcagtggattgaacttattctgctctgttgccacgaacggatgcgcttcccctttcataatgccaaaaaggtaaaaacgcgtctggcgtatgcagcgcgttaccagtccggaaaaatttacccgatagtgacgcccgttacctgtggtgaggttgatcagcacaaacccgccccagaaagccagtaaggcaaaaccacaccaggtatgcacttgtaccattagcgctacagggccgagagaaaaatgaccaaataaaccgcttaacagtaataaaacaaacagtaacgcatttccccaatgccagcggcgaatcgccagcgagtagagatagtcacgatgttcttcaccgcccgccgtttttggcgccagcatccggcgcaataacgcatggataaccagcccaacaagcatgagcagcaccacgacgcctgcgtaaattaaccacagcggccaataatctggcgcataatgtagttccgctccccagatagtattcatgctttaccctcctgatggacttctttacgacggtacagactgaccgcgccgctacgcgcctcctgctggcgatagacctctttctgaccgacccagcgctggatctcgctctcatccagtctgccgaatttcagcgcgtccgttgggcaaacggatacgcacgccggagactggccagccgccaaccgcgtgtcggcgcagaagttacacttgtcggcgacaccggtttgcggattcaaatagcgcacatggaaaggacacgcggcaacacaataatcgcagccaatacagcgcgatttatccacctgcacgatcccgttttcatcacgatatgacgctccggtaggacaaacgctgacacatggcgcattttcacagtgctgacaggagacgcggacaaattgaaaatgggttagtgcgttggatgcctgttcaggggcgcgaatttgtacctgtacgcggctaaatccctccggtacgtcattaagcactttgcaggcaacggtacacgcctggcagccgatacaacgtttttcatcatgcagcatgacgtactgattcgttaaatgattcatggttccctcctccctcatgcccggctcagcgtcacgcctgcggtatgcactaccgtaccggataccggactcgtcacgtgcggcagtaaatttccgcagtggataccgtgtgtcgtcgccgccgttttggccccagctttagcgccaaatcccatatagacaaaaagcgtgtccgggcggataccgggcgtcaccagcgccttacctttctctttacccgtggcattttccagccagatctcatcgccggtcttaatgcctttttcttgcgccgtttgcggatgaacccagaccgcgttatcccacattagctcgctgagtaaaggtacgtactgcgtcgcgccattggtatgcacggccaccttgccctgaatgaagtaaagctcattctcttttttcagcgcaaagtcacgaacgcgcggaacgccgtagccagggagcaattcctccagggttgcggaataaagttcgattttgccggagggcgatttgaagcgaagctgttcgccataggtgttgtcactgtccgtcgcgatagcgccggggtaacgcgccgtaaactgacgaacggattctggttcgcgtaatagcagcggaacgccccattcgagataccctttctgtcgcagttccttcgctaaggcatggtcgccgttcaactgatagagttggcgcgtctgcatatcctgccacggatagtactgccctaatcccaactgctcgccaagttctttccagatttgccaactcggacgcgcctcgccaatcggctctacgacctgttggcgcagagcgtaagccgggtgcagtcccgacatatcggatacctcttcgtcccgttcgagataggtgcattccggcagcagatagtcggcatatgccgcgctctcgctcaaatagacatcgcagctgaccaccagatccagttgctcaacggtttttaccaggtccgaacgacaggtgacggtctggaaaggattatgccgcgacataatccacgcctttatcgggtaaggcttctgggttaacgccgagtcaataatgctttgcaccacgccgccgccagcggcgatatatttaaactgcggtgcgaccaaatcgatgcgttgcgccgtcggtttcggcatatttttaatgttgagtttcgccagcgttggcgcgaccttttctccggccagtttattgtaaacagacgcgttttttttctgatatagcccgccttcgcgctcaatattaccgagcagcacattaagcgtaaaaatcatacgccgcatatcgatctcttcctgcgagaacgtcgcgcgatgaccaggactgacaatagcgtgaggcgcgcaggcagccagttcgcgtgtcacccggacaataacgtcggctgggacatcggcctgcgcggcggcccattccggcgtcgtctcttttaccgcctgtgctaactgttcaaatccgctggtataacgctcaacaaaagacgcatcgtagagctgttcatcaatcatgacgtggcacatcgccagcagaaccgctaaatcccccccgggacgaatagcgtgccactcatccgccttgctggaaaatatcgacaaacgcggatcgaagctcaccattttggcccccttctcctgcgcggtcattaactcatgggtatcggcaacttcaatcccttcatacaaattgtggccaaacgaaaccagatagcgcgtgttagcgatatccatcgccagatcgccgcccatcatcacttttgccgcaatggctttcccggcagggcatgttgaggcgtgcgtaaaggtattaggcgaaccaaaggccgtagccagatggaaaagatggctggagagcgagcccgatttggaagagaaagccacgctctcggggccatgctgcgctttgatggcattcattttcgccgcgatttcctggtaagcctgttgccagctaatcacctgccattcaccgtcgccgcgtggcccggtgcgtttcataggttttacaatccgttgcgggtcattgaccaggctgacgccgctcccgcccctggcgcatatgcgcgtcccctgctgcggcgcagaaggattgccctggataaaaacggtcttgttattgactacctgcgcctgaatagggcaacgaaaggaacacatttcgcacaagcttggcgttagcgtggttttaccgttaatgccggcaatcgggttgcgcgccagcgccccgggcggaaaagcgcccagcgcgcaggcagagcagccgatgcctaccccctgcaaaaaagaacgacgactaatgctcatataacctcctgttattagatatagctgaagattatatttaatttgtattatgaaatgtcggcttcaatcacaatttgaaatagttgttaaaatgagcatgtcaacacgataaaaccttttattttataaatattttacatttcctgaacacgcacatggactgtcattgaataatcagcagaattaccaaacaacccgctgttaattataaaaatgatacaattccaataacacgtaataatatttaaaagaaaacgattatttcctgaaaagcgatttcacgcgctttacgcagttctttctcatacgcgccggaacgtccgccgacgatatcccgaatgccggcgaaaaacgctggttgagcatcgaagcgggtttacttttgcgtgcacacgggcttcgttacccgacccgctcccttatgccttgatttttccgcagatacgtcagcgtcccacaatacggtgacatgatgacaggatggacactttctgaaagaaacctgccagataacatggtgaattgtgatctccatcgccataccgacatatgaagcttacttttaaggcgttaaaaatccagaccgtttttccataatgatgttgataaggaattctaatgaagatatcatcaggcgcaattaatttttctactattcctaaccaggttaaaaaattaattacctctattcgtgaacatacgaaaaacgggctcacctcaaaaataaccagtgttaaaaacacgcatacatctttaaatgaaaaatttaaaacaggaaaggactcaccgattgagttcgcgttaccacaaaaaataaaagacttctttcagccgaaagataaaaacaccttaaacaaaacattgattactgttaaaaatattaaagatacaaataatgcaggcaagaaaaatatttcagcagaagatgtctcaaaaatgaatgcagcattcatgcgtaagcatattgcaaatcaaacatgtgattataattacagaatgacaggtgcggccccgctccccggtggagtctctgtatcagccaataacaggcccacggtttctgaaggtagaacaccaccagtatccccctccctctcacttcaggctacctcttccccgtcatcacctgccgactgggctaagaaactcacggatgcagttttacgacagaaagccggagaaacccttacggccgcagatcgcgatttttcaaacgcagatttccgtaatattacattcagcaaaatattgccccccagcttcatggagcgagacggcgatattattaaggggttcaacttttcaaattcaaaatttacttattctgatatatctcatttacattttgacgaatgccgattcacttattcgacactgagtgatgtagtctgcagtaatacgaaatttagtaattcagacatgaatgaagtgtttttacagtattcaattactacacaacaacagccctcgtttattgatacaacattaaaaaatacgcttatacgtcacaaagccaacctctctggcgttattttaaatgaaccggataattcatcacctccgtcagtgtcagggggcggaaattttattcgtctaggtgatatctggctgcaaatgccactcctttggactgagaacgctgtggatggatttttaaatcatgagcacaataatggtaaaagtattctgatgaccattgacagcctgcccgataaatacagtcaggaaaaagtccaggcaatggaagacctggttaagtcattgcggggtggccgcttaacagaggcatgtatccggccagttgaaagttcgctggtaagcgtactggcccaccccccctatacgcaaagtgcgcttatcagcgagtggctcgggcctgttcaggaacgtttttttgcccaccagtgccagacctataatgacgttcccctgccggctcctgacacatattatcagcagcgcatactgcctgtgttgctggattcgtttgacaggaacagcgccgccatgaccactcacagcggactctttaatcaggtgattttacactgtatgacaggcgtggactgcactgatggcacccgccagaaagctgcagcgctttatgaacagtatcttgctcacccggcggtgtctccccacatccataatgggctcttcggcaattatgatggcagcccggactggacaacccgcgctgcagataatttcctgctgctttcctcccaagattcagacacggcgatgatgctctccactgacacgctgttaacaatgctaaaccctactcctgacactgcatgggacaacttttacctgctgcgagccggagagaacgtttccaccgcgcaaatctctccggtagagttattccgtcatgactttccggtgtttctcgccgcatttaatcagcaggccacgcagcgacgctttggggagctgattgatatcatcctcagcactgaagagcacggggagctgaaccagcagtttcttgccgccacgaaccagaaacattccaccgtgaagttgattgatgatgcctcagtgtcgcgtctggccaccatttttgaccccttgcttcctgaaggcaaactcagcccggcacactaccagcacatcctcagtgcttatcacctgacggacgccaccccacagaagcaggcggaaaccctgttctgtctcagtaccgcattcgcacgctattcctccagcgccattttcggcactgagcatgactctccgccggccctgagaggctatgcggaggcgctgatgcagaaagcctgggagctgtctccggcgatattcccatccagcgaacagtttaccgagtggtccgaccgttttcacggcctccatggcgcctttacctgtaccagcgttgtggcggatagtatgcaacgtcatgccagaaaatatttcccgagtgttctgtcatccatcctgccactggcctgggcgtagtccagcctcaacccgcatggaattaagggacacagcgttgtgtccctctgtacatagacccgttttagtccatgcattttttgagatcccggccagattgcccctggcctaaattccatacagtactaaatcagaatcagtaatttcagatggaccggaatatggtttaccatagagggagcgtagtttagtgtcgctgatgatcattttagtattttgtactcaccatcgcatgtacgaacattagcaacaatatcaattggtgtacaaatacaatcaatcaacgacaaaataaaagaataaaatatttcatatacatataacatcaggcgtgtacatcaagtgacagttaaaaacgacagcatacagagcacattcctcttccacgattacgaaaccttcggtacgcatccagccctcgacagacctgcgcaattcgccgcgctccgtacggataacgacttcaacgttattggcgagccggaggtgttttattgcaaacccgccgatgattatctaccgcagcccggcgcggtgctgattaccggcatcacgccgcaggaagcgcgtgagaaaggagaaaacgaagccgctttcgccagacgcattcatgcgctgttcaccgttcctaaaacctgcgttgtgggctacaacaatgtgcgctttgatgatgaagtcacgcgcaatattttttatcgcaacttttacgatccctacgcctggagctggcagcatgataattcacgttgggatctattggatgtcatgcgcgcctgttatgcgctgcgcccggagggaattaactggccggaaaacgacgacggcctgcccagctttcgtctggaacatttaacccgggcgaacgggatcgaacacagcaacgcgcatgatgcgatggcggatgtctacgccactattgcgatggcgcaactggtgaaaacacgccagccgcggctgtttgattatctttatagccaccgcagtaaacataaactggcggcgctgattgacgttccgcaaatgaagccgctggtgcatgtctccggcatgtttggcgcgtggcgcggtaatacaagctgggtcgcgccgctggcgtggcatcctgaaaaccgtaacgcggtgatcatggtcgatttagcaggcgatatttctcctcttcttgagctggacagcgatacccttcgcgagcggctttatacggccaaagccgatcttggcgatcacgccgcagtgccggtaaagctggtgcatatcaataaatgtccggtactggcgcaggcgaataccttgcgcccggaggatgccgaccggctgggaattaaccgccagcactgcctggataacctgaaagtgctgcgtgaaaacccgcaggtccgcgacaaagtggtggcgattttcgccgaagccgaaccttttgccgcctcggataacgttgatgcccagctctatgatggttttttcagcgatgccgatcgcgcagccatgaaaatcgtactcgaaaccgagccgcgtaacctgcccgcgctggatattacctttgtcgataagcgcattgagaagctgctgtttaattaccgcgcacgcaattttcccggtacgctggatgacgcagagcagcagcgctggctggagcatcgccgtcaggtgctgacgccggagtttttacaacagtatgccaatgaattgcagatgctttctcagcagtatgcggaagataaaacgaagctggggttgctgaaatcactgtggcagtacgcaaccgagattgtgtaattgaccaatgcctgacgggcattgttaatccagagcggataaatagtgacgccgccatccggtaaacatgctggatgacaaacaaaaaaccggaggcactgcctccggttttactattgccgataatacgcgcgattacgcgacgtcttcgtactgtggaaccgggttgcggaagcttttagttacgcacgccagataaatcagcccgatacccgcccagatcaggcccagtaccattgagctctcttccaggttaacccacaacgcaccaaccgtgagcgcgccgcacatcggcaggaacagatactggaagtgatctttcaacgttttattacgcttctcacggatccagaactgcgaaatcaccgacaggttaacaaaggtaaacgcgaccagcgcaccaaagttaatcagcgctgtcgccatcaccaggtcaaaattaatcgccagcagcgcgatcgccccgaccaggatgatgttcatcgctggcgtacgccatttcggatgaacgtaaccgaagaagcttttcgggaatacgccgtcgcgccccattacgtacatcaggcgcgctacgcctgcatgcgcagccataccggaagccagcacggtgatagtagagaagatcagcgcgcccacctggaaggttttacccgccacgtacagcatgatttccggctgagacgcatccggatctttaaagcgagagatatccgggaagtacaattgcaggaaataggttgcaaagatgaagatcaggccgccaatcagcgcggtcaggaaaatcgcacgcgggatcacgcgctcagcatctttggtctcttccgacaggttactgatgccgtcaaagccggtaaaggagaagcacaggatcgtcgctcccgtaatcatcgggataacgtgcgcatcgccggaccagaacggacgggtgctcgccagcgtaccggcgccttcgccttcaaatacgccataaaccaccatgcccagaatgaccgcaatcagcaccacctgtagcactacaatcacggtgttgaagttagcgaccgatttgaggctgcgcaggttaaaggccgtcataaaggccaccagcgccacaacaaacacccatgacggaatggagggcaccagcgcttcaaaataaattttcgccaacagaatgttgatcatcggcgcgaacagataatcgagcagagaagaccaacccaccataaagccaacggtcgggctgatggatttctgggcataggtatacgccgaacccgcggaagggtagcgacgcaccagtttcccgtagctcaacgccgtaaacagaatcgcgattaacgcgaatgcatacgccgtcggtacgtgaccgtcagtgaggcctgaaacgataccaaatgtatcgaacagcgtcatcggctgcatataggcaagacccatcattacaaccggaactaacgtaagcgttttacgtaattccacgcgagaggtgtttggagtaacgttatgcgacatggtcattctcctttacggcgaatgccgtcgcgtaagcaaaaaattgccccattttctggattcctcagcgacaacaactgtcgatttttaagtaagtatctatccggtacgaagcccggcctcttggtattgaatgatgtgtttgaagcaaaaaaataaccgacgcgtattaaaacgtcggttagtgtcattttttgcaagcggcgtattctgccctaaattgaagtgaaatgacaagagaatgcgagcgcgttcaaaaaattatttttcataagcgattgatttttaaaccggcgattttgcatacaccccagcaatagcattatttgctaaaatttcatcccgccaccagccactggccagcccggcggtctgttcattccagccaacccacaccggttcatagacgatttgcgccacaactttcttctctataagcgcgccgctttccaaaaatcgctgcgccagataacgcggtaaatagccgcatcccaggccgctaatttgcagctccagcttggttttaaaatcaaacacggtaatcgcttcctgagcgtcgagcagttcagaccctattgatcgcgaggaatggacgctatcgccaaccacaatcgcgcgaaaacgtttgatcgtctggcggctaagcggttcctcttcatgaaccagcggatgatgaggggcgacggcaaacaccagttcaaggtcgcccagtcttgcaaagccaaagccggtgtcaggcggcggcgcgcgcatggcgccaacaataatatccgcccttccctgcgtcagcgtctcccatgaaccgccgagaacgccattaacaaatttaaggcgcgttacgctgtggcgttgataaaaagcgtcgataagcggggccagaagagaaaagggaaaggtatcatccacaccgatgaccagttcgttctcccagccttcatgcagtttaatcgcctgcttttccagctcgcgaacggtgtgcagcacttcacggcctttttccagtagcatcttaccggttcgcgtaaatcgcgcgcgatgcccgctacggtcgagcagttggatattaagatcgttttccagcttatgaacggtataactgagggcggacggcgttttaaataattttgccgacgccgccgcgaagctgccttctttttctaacgcatcaagaataatcagaacgtccagcagtggtttcatactcgtccccttgcgctatatggcgaccacctgctggacagcgactcactccatcggcatcaccaacggatcgggatattgatattcaaatcccagctcattacaaatccggctaccgtcgataatcttccctttgccgttgtccggtgcgtcacgaaaatgcggcggcgccattcccagcaagcgcgtcatttgcggataaaacacgttgcgggctggatgcgccggcgcacatatattatagatgtgccctcctttcggcgcctgtagcaagagggtaattgcgccaaccacgtcttcaagatgcaccagattgaccccgtgttgaccatccggcgcggtttttccggcaaagaaacgtccgggatggcgcccaggcccgaccaaccccgccagccgcagaatatccactgacgtgcccggcagattatgcagccaatcttccagttccttcagggtacgcccgctggccgtgaccggattacgcggcgtattctctttcaccacgccttgcgcatcgccgtaaacagacgtcgaactggtaaaaataatacgcgggatacgataagccagcgcgctgtcgaccagctcctgcatcgcctgcagataaaaatcctctcccggaccgctacggcgcgcgggcagtgttatcaccagcgcatcgacatccagcagagcgtcaagatcgtccgcctcacagaccaactccggctccagacgcagcggatagctttcaattccactcatacgggccgcttccaccccgtcaagggtggttttgctgccggtaacctgccagcctctcgctgccagcgacattgccagcggcatgcctaaccaacctaaaccgacaattgcgacctttttcatccattttctcctgactttaacgccttatacataaggctacgccagcccgccgtgactgacaattcatactataaatgcgaaatgaaaaaagcgcttgctttaaggcgtaaaagtggtttaggttaaaaggtatcaaatgaataagcattcatcggaatttttatgacacgcgttcaatttaaacaccaccatcatcaccatcatcctgactagtctttcaggcgatgtgtgctggaagacattcagatcttccagtggtgcatgaacgcatgagaaagcccccggaagatcatcttccgggggctttttttttggcgcgcgatacagaccggttcagacaggataaagaggaacgcagaatgttagacaacacccgcttacgcatagctattcagaaatcaggccgtttaagcgatgattcacgagaattgctggcccgctgcggcataaaaattaatttacacactcagcgcctgattgcgatggcggaaaacatgccgattgatatcctgcgcgtgcgtgatgatgacattccgggtctggtaatggatggcgtggtcgatctcggtattatcggcgaaaacgtgctggaagaagagctactcaaccgccgcgcacagggcgaagatccacgctatttaaccctgcgccgtcttgacttcggcggctgccgtttatcgctggcaacaccggttgacgaagcctgggacggcccggccgcgctggacggtaaacgtatcgctacctcatatccgcacctcctcaaacgctacctcgaccagaaaggcgtctcttttaaatcgtgtctgttaaatggttctgtcgaagtcgcgccgcgcgcggggctggccgacgctatctgcgatttggtctctaccggcgcgacgcttgaagctaacggcctgcgtgaagtcgaagttatctaccgctctaaagcctgtctgattcagcgcgacggtgagatggcacagagcaagcaagagctgatcgataaattgctgacccgtattcagggcgtgattcaggcgcgcgaatcgaaatacatcatgatgcacgcgccaagtgaacgcctggaagaggttatcgccctgctgccaggcgccgaaaggccgacaattctgccgctggcaggcgagcaacagcgcgtggcgatgcacatggtcagcagcgaaacgttgttctgggaaaccatggagaaactgaaagcgcttggcgccagctcgattctggtactgccgatcgagaagatgatggagtgatctgacgcctgatggcgctgcgcttatcaggcctacgtaatgcgttgatattttgggttctgtaggccggataaggcggaaccctgtgatggagtaaagaccatgagcttcaataccctgattgactggaacagctgtagccctgaacagcagcgtgcgctgctgacgcgtccggcgatttccgcctctgacagtattacccggacggtcagcgatattctggataatgtaaaaacgcgcggtgacgatgccctgcgtgaatacagcgctaaatttgataaaacagaagtgacagcgctacgcgtcacccctgaagagatcgccgccgccggcgcgcgtctgagcgacgaattaaaacaggcgatgaccgctgccgtcaaaaatattgaaacgttccattccgcgcagacgctaccgcctgtagatgtggaaacccagccaggcgtgcgttgccagcaggttacgcgtcccgtctcgtctgtcggtctgtatattcccggcggctcggctccgctcttctcaacggtgctgatgctggcgacgccggcgcgcattgcgggatgccagaaggtggttctgtgctcgccgccgcccatcgctgatgaaatcctctatgcggcgcaactgtgtggcgtgcaggaaatctttaacgtcggcggcgcgcaggcgattgccgctctggccttcggcagcgagtccgtaccgaaagtggataaaatttttggccccggcaacgcctttgtaaccgaagccaaacgtcaggtcagccagcgtctcgacggcgcggctatcgatatgccagccgggccgtctgaagtactggtgatcgcagacagcggcgcaacaccggatttcgtcgcttctgacctgctctcccaggctgagcacggcccggattcccaggtgatcctgctgacgcctgatgctgacattgcccgcaaggtggcggaggcggtagaacgtcaactggcggaactgccgcgcgcggacaccgcccggcaggccctgagcgccagtcgtctgattgtgaccaaagatttagcgcagtgcgtcgccatctctaatcagtatgggccggaacacttaatcatccagacgcgcaatgcgcgcgatttggtggatgcgattaccagcgcaggctcggtatttctcggcgactggtcgccggaatccgccggtgattacgcttccggaaccaaccatgttttaccgacctatggctatactgctacctgttccagccttgggttagcggatttccagaaacggatgaccgttcaggaactgtcgaaagcgggcttttccgctctggcatcaaccattgaaacattggcggcggcagaacgtctgaccgcccataaaaatgccgtgaccctgcgcgtaaacgccctcaaggagcaagcatgagcactgaaaacactctcagcgtcgctgacttagcccgtgaaaatgtccgcaacctggtaccgtatcagtctgcccgccgtctgggcggtaacggcgatgtctggctgaacgcgaatgaattcccgacagcggtggagtttcagctcacccaacaaacgcttaaccgctacccggaatgccagccaaaggccgtgattgaaaactacgcgcaatatgctggcgtaaagccggagcaggtgctggtcagccgcggcgcggatgaagggatcgagctggtgatccgcgccttctgtgaaccggggaaagacgccattctctactgtccgcccacttacggtatgtacagcgtcagcgccgaaaccattggcgtagagcgccggacggttcccgcgcttgaaaactggcagctggatctacaggggatttccgacaaccttgacggcacaaaagtggtgttcgtttgtagccccaataatcctaccggacaacttatcaacccgcaggatctgcgcacgctgctggagttgacacgcggtaaagcgatagtcgtcgccgacgaagcttatattgagttttgcccgcaggccacgctgacaggctggctggttgaatatcctcatctggttatcctgcgcacattgtcgaaagcttttgcgctggcgggtctgcgctgcggctttacactggctaatgaagaggtgatcaacctgctgttaaaagtgatcgccccttatccgctttctacgccagtggcggatatcgccgcccaggcgctgtgcccgcagggaataaacgcaatgcgcgatcgcgtggcgcagacagtgcaggaacgtcagtatctggtgaatgccctgcaacagaccgcctgcgtagaacacgtctttgactctgaaaccaactatattctggcgcggtttaccgcctccagcagcgtgtttaaatccttatgggatcagggcattatcttacgcgatcagaataaacaaccttctttaagcggctgcctgcggattacggtcggcacccgccaggaaaaccagcgcgtcattgacgccttacgtgcggagccagtatgagtcagaagtatcttttcatcgaccgggacggaaccttaatttccgaaccgccgagcgattttcaggtagaccgctttgataaactggcctttgagccagaggtgattcccgtattgctgaagctgcaaaaagccggttttaagctggtgatgatcactaaccaggatggacttggcacgcaaagcttcccgcaggcggacttcgacggaccgcacaacctgatgatgcagattttcacctctcagggcgtatgctttgatgaggtgctgatctgccctcacctgcccgcagacgactgcgactgccgcaagcccaaagtgaagctggtggagcgttatcttgcggaacaagcgatggatagcgccaacagctatgtgattggcgatcgtgcgaccgatatccagctcgctgataacatgggcattactggtttacgctatcaccgtgaaacgctgaactggacgatgattggcgaacagctaacgaaacgcgatcgttatgcgcatgtggtccgcaacaccaaagaaacacagattgatgtcagcgtctggctggatcgcgaaggcaacagcaagattaataccggcgtcggcttctttgaccatatgctcgatcaaatcgccacccacggcggctttcgcatggagattaccgttaagggcgatctctatatcgacgatcaccacacggtagaagataccggactggcgctcggtgaggcattaaaactggcactcggcgacaagcgcggtatctgccgttttggctttgtactaccgatggatgaatgtctggcgcgctgcgcgctggatatttccggtcgtccgcatctggaatataaagctgaatttacctaccagcgtgtgggcgatttgagcacagagatgattgaacactttttccgctcactctcttacacgatgggcgtcactctgcatctcaagactaaaggtaagaacgatcaccaccgtgtcgaaagtttgtttaaagcctttggtcggacgctacgccaggctattcgcgtggagggcgatacattaccgtcctcgaaaggagtgctgtgatgaacgtcgtcatccttgacaccggctgcgccaatttaagctcggtaaaatccgccgtggcgcgccacggttacaccccggtggtcagccgcgaagcggaaatcgtattacgcgctgacaaactctttctgcccggcgtcggcacggcgcaggccgctatggatcaactgcgcgaacgtgaactgatcgacttaattaaagcgtgtactcagccggtactgggtatctgcttagggatgcaactgctgggtcgtcgcagcgaagagacgcgcggcgtggatctgctgaacattatcgaacaagacgtgccgaaaatgaccgactttggtctgccgctgccgcacatgggctggaatcgcgtgtatccgcaggcgggcaaccggctgtttcagggcattgaagatggcgcctatttttactttgttcacagctacgcgatgccggtcaacccgtggactatcgcccagtgcaattacggcgagccgtttaccgcggcggtacagaaagataatttcttcggcgtacagttccacccggaacgttcgggcgcggcgggcgcacagttgctgaaaaacttcctggagatgtaatgattattccggcattagatttaattgacggcaccgtggtgcgtctccaccagggtgactacgcccggcagcgggattacggtaacgatcccctgccccgtttgcaggattacgccgcccagggcgccggggtgctgcatctggtagatctgaccggcgctaaagatccggctaagcgacagataccgctgattaaaaccctggtcgcgggcgtgaacgtgcctgttcaggtcggcggcggcgtgcgtaccgaagaagacgttgcggcattactgaaagctggcgttgcccgtgtggtcatcggttcaacggcggtgaaatcccctgacgtggtgaaaggctggtttgaacgttttggcgcgcaggcgctggtactggcgctagacgttcgcatagacgaacacggcaccaagcaggtggcggttagcggctggcaggaaaattccggtgtctcgctggaacaactggtggagacctatctccccgtcggcctgaaacatgtactgtgtaccgatatttctcgcgacggcacgctggcgggctctaacgtttcgctgtacgaagaggtatgcgccagatatccgcagatcgcctttcaatcctccggcggtattggcgatatcgatgatattgccgccctgcgcggcaccggcgtgcgcggcgtgattgtcggacgcgcgctgttggaagggaaatttaccgttaaggaggccatccaatgctggcaaaacgtataattccgtgtctggatgttcgtgatggtcaggtggtgaaaggcgtacagtttcgcaaccatgagatcattggcgatatcgttccgctggccaaacgctatgccgacgaaggcgcggacgaactggtgttctatgacattaccgcctccagcgatggtcgcgtagtcgataaaagctgggtggcgcgcgttgccgaggtgatcgacattccgttttgtgtagcgggcggcatccggtcaattgacgacgccgccaaaattctttctttcggggcggataagatctctatcaactccccggcgctggctgacccaacgctgattacccgtctggctgaccgttttggcgtacagtgtattgtcgtcgggattgatacctggtttgacgacgccacggggaaataccatgttaaccagtataccggcgatgaaaaccgtacccgcgtgacgcagtgggagacgctggactgggtgcaagaggtacaacagcgcggcgcgggggaaatcgtcctgaatatgatgaaccaggacggcgtgcgtaacggttacgatctgacgcagttgaaaaaagtccgtgacgtttgccgcgtgccgctgatcgcctccggcggcgcgggcacgatggaacactttcttgaggcattccgtgatgccgatgtcgacggcgcgcttgccgcctccgtttttcacaagcaaatcatcaatattggcgaattaaaagcgtacctggcaggccagggcgtggagatcaggatatgttaacagagcaacaacgccgcgagctggactgggaaaaaaccgatggcctgatgccagccatcgtgcaacatgcggtatccggcgaagtattgatgctgggctatatgaacccacaagcgctggacaaaaccattgaatccggccatgtcacgttcttctcacgcacgaaacagcgtttatggaccaaaggcgaaacctcaggccatgtgctgaatgtcgtcagcattgcgccagattgcgacaacgatacactgctggtgctggcaaaccctgtcgggccgacctgccacaaaggtaccagcagctgctttggcgacgccagccatcagtggttattcctgtatcaactggagcagctactggcagagcgcaaaaccgccgatccgaccagctcttacacggcgaaactgtacgccagcggtaccaaacgtattgcgcaaaaagttggcgaagaaggtgtggaaaccgcgctggcggccaccgtcaatgatcgttttgaattaaccaatgaagcgtctgatttgatgtaccacctgctggtgctgttgcaggatcaggatctcaacctcaccaccgtgatcgacaatcttcgtaagcgtcatcaataagcgtaaaaaaaccgggcaatgcccggttttttaatgagaaattttacctgtcgtagccgaccaccatccggcaaagaagcttacaaggcttttggcttatagctacgtagcgcattgcgtcccagcacaatcccggcaccgatcatcccacccagcaatacagccagcacaagggtaatggctgttttcgggctatcgcgacggaccggcagcgtcggcttcatcacataacgatagacgtgcaccgtatcggcagtcactttcagatttttaatgtccagcagtgtctgcttcgtctggtaataggccggagaaaagaccagtggacgcgtcgcttcgttctgtatcatcgattttagcgcatcgctccccaacaggaacatcgtgtcctgggtaacatcctgggtttgctgaatctgcggctgcgtgattttggcctcatccgcatagcgcaacgcttcttcgatttgcttaatacgcagatctttttgctcctgcgccacaacttcctgcgtctcaagggactcctgcaacgttttggtttgcagcgtgatgttatctttcaggtcaacttccagttccttagcgacctcttcatccacctgttggatatattccgccagccgacgctgcgccccttcagcggtagtactcacataagaaaccgagagtggcagcgcctgcccttttaccgactgttcaatggtaagcttttcccgctctttctgattatccagcacttccgataatgcggaaaacgcagagctaaagcggcttataaaattcgcctgcacttcagagattttgggggcattcccaccatacaagacgttgagcgcgttggtataggtggcaacctgcgcggcatcaggttgggtaataatcgccgtggatgtccatttttctttggctatcatcaggtagcctacagccagcaaaatggcgataataacggctacaataatggtcatcttcccacgccataactgtagcaataactcaatcaaatcaatctgttccggatcgttcccacgcccggaagacgtattactatccactgtcatagataccctaactaaaaaaaggatgaagctggagacagtgtagccataaagcaaatatatgccataggattaatgataaaaatcagacattatttccatttggtcaataaatcatcgggactcatcagccccgattgccttattaatcactaccgaaaagatcgcgggtatacactttttcagcgacatccaaaagctctgccgccatcctgttggaaataatgacatccgcctgctgtttaaagcagtgcaaatcacgttcaagacgtgagttaaagaaagtatcttcttccattaccggctcatagatgatgacctctacgcctttcgctttaatgcgcttcataatcccctgaatcgatgaggcgcggaagttatcggagccactcttcataatcaggcgataaatgcccaccactttaggctttctggcgaggatagcgtcggcaataaaatctttacgcgtacggtttgcttcaacgatagcggagataatattattaggcaccgactgataattggccagcaactgtttggtatcttttggcaaacaatatccgccataaccaaaagagggattattataatgattgccaatacgcgggtcgaggcacaccccttcaataatttgtcgggtatttaatcctaacgtttcagcatagctgtctaattcattaaaataagcgactcgcatagcgagataagtattggcgaaaagtttaatggcttccgcctcagtggagtccgtaaacagcgttggaatctcctgtttaatagcgccttcctggagtaatgcggcaaattctctggcgcgctcagactgttccccaatcacgatacgggagggataaaggttatcgtaaagggctttaccttcacgtaaaaactccggagagaaaatgatattttctgtcgcaaacttctgacgcattgccgccgtgaagccaaccggcaccgtagacttaataatcatcactgctgcggggttgatgctgatcacatcctgcatgaccgattccacactggacgtattaaaatagttagttttgggatcgtaatccgtaggcgtagcaatgatgacgtaatctgcattctggtacgcatcaaacttatccagcgttgccctgaatctgatgttatcttcctttaaaaattgctgaatttctttatcaacaatcggagatatccgatcatttaacagttcaacacgggaaggaacaatgtctaacgccaccacatcatgatgttgtgcaataagcaaaccattagacaagccaacataacccgtcccggatatcgtgattttcattattcgctctcagaattaacttaattatgaatcatgatgtatttcgcatcctgataagatattaaagttttaacgcctgagtatataaagtgcaacgcagacgaaaacaattcagattatcttcattacgataaacacagattattaagttaatattaagcaaaagcgataaatcaataagaatagagataaaaaaaagcccggtattaaaccgggcttaaacatttttgcagaaattattccaaccattcggtatggaaaatgccttctttatcagtacgtttataggtgtgcgcaccaaagtagtcacgctgcgcctgaattaagttagctggcagtactgcggcgcgatagctgtcatagtaggccactgccgcagagaatgtcggcaccggaatgccgttctgcaccgcgtaagccacgacatcgcgcagcgcctgctggtactcatcagcaattttcttgaagtaaggcgctaacagcaagttagcgatatcggcgttttctgcgtaagcatcggtgatcttctgcaggaactgagcgcgaatgatacagcccgcccggaaaatcttagcaatctcgccgtagttgagatcccagtgatattcatcagacgcggcgcgtagctgcgagaagccctgcgcataggagacgatcttgccaagatacagcgcgcgacgcactttctcgataaattcagctttgtcgcctgccggctgcgctttcggcccggagagcactttagatgcggcaacacgttgcgctttcaacgaagagatgtaacgcgcaaagacggattcggtaatcagcgacagcggttcacccagatccagcgcgctctggctggtccatttaccggtccctttgttggcggcttcatcaagaatgacatccaccaggtagtttccgtcttcatcttttttagtgaagatgtctttagtgatgtcgatcagatagctgctcagctcgccgttattccactcagtaaaagtgttcgccaactcttcattgctgagattcaggccgcctttcagcagggagtaagcttcagcgataagctgcatatcgccatattcaataccattgtggaccatcttgacgtagtgaccagcaccatcggcgccgatataggtcacgcacggttcgccatcttctgccacagcagcaatcttcgtcaggatcggcgccaccagttcataggcatctttctgaccgccaggcatgatagatggccctttcagcgcgccctcttcaccaccggaaacaccggtaccgataaagttaaaaccttccgcagacagctcgcgattgcgacggattgtgtcctggaagaaggtgttaccgccatcaataatgatatcgcctttttccagatacggtttcagcgaatcgatagctgcatcagtacctgcgcccgctttcaccattaacaggatacgacgaggcgtttcgagggattcaacaaactctttcaccgtgtaataaggcaccagctttttgccgggattctcggcaatcacttcttcggtcttttcacgggagcggttgaaaacggagacggtataaccacggctttcgatgttgagcgcgaggttgcgccccatcactgccataccgacgacgccgatctgttgcttggacattacatactcctgtcaggtgtggaaaccctgccacaaacggtcatggcaggttaaaggtgaatagtatgttaactcaaaggtatgatattaaggtagcgattgatgcgttcagattttacgcaggctaatttatacaattattattcagtacttctcggtaagcttaatacgcaccatctcgccgcaaaacaactttcgctgttttaaacagaatggcaatatcattccaaagcgtccagtttttaacataccaggaatcaaaataaacacgagtgtcataatcaacatcattacgcccactcacttgccatagacctgtcatgcccggctttgccatcaaataataatcaacatcatcacaataacgctccagttcatccgaaacgataggtcgtggtccaaccaggctcatatcaccttttagtacattaaaaagttgtggcaactcatcaaggctagttttacgtataaatcgacctacagctgtgattcgaggatcatttttcagtttaaaatctttctcccattcagccctggcaataggatcgttagccaaaagttcttttagtacctcttgagaattcataaccatagaacgaaatttgtagcatggaaaaagttttccatgccgacctactcgctggtgaccataaatagccggaccaccatctcgagtaactttataccacagataaatcataagtggtgatgcaattataagaatcattattgaacaaacaatatcaaatgtccgtttgagaaaacgggacgaccttttagccaagttattttgtatccttaataacataacttcatggctaaagataaaagacatatcagtattatataatggcaatcctctaaacgaggggactacagtaacagaacgacaatgatgttttgaaagttcacgtagccaaaaatgtgttttctccaactcggtgtattcataagcaaggatataatggacatcacctgtacgatttaaatcccaaataatctcagtatcctttatcaccggcaacatatttatttcagcatctgacgcatccgtatcaaaaaaagcgataacatcaaaccccatcatctcctcactttgcagcgcagaatatgcaccacgagcattctgtccgctccccaggatgatagtttttttcttccagatacctagcttgttcaataaatgctttgtaagtgcgcgaaaaaaaggcaccaggattagggcaaaagtccaacaaaacacccagacatagcgtgaaaactgccattttgtaaacgctatcagagccaaatcaaatatagcaaaaataacgatcgtacgaaaaatttcttttaactcataccaaaatggcttgcggtatgtataatgtcgcaaacgaatccaaaaccaaccgacacatactactgacaaaataaaatgcgtaataactcttgtatctaattggtcttgaggaataaatcgctgtacttgatcaaaaataaaatagacacatcctaatgaaaaccataaggctaaattaaaaaaaatcaaatccgatatagccaaaaaaattttacatagctgtggattatacttattatcaatattatccatttaatcctcaccctctgaccgtgcataatgtaaataaaataggcatattaagtaaataacattcaatttttttacagcaagcatcgttttttaatattagcaagcgttgtatttacaagatcctgagccctatttaataaattagcttctgcatagcagcgtaactcaggtgcattaccagaagcgcgcaaatgcacaatacatccatcacgtaaagtaattcgcataccatctgtcatatctgtagaaattgcaccttcattctccaaaccaatatagcttaagaggttgctcagattttctctgcccatactaattaaggattgacttttatcagttgtaatcccctgtaatctgtcagaatgggtgtaacgagttgggagttcattgactaaagcgctaatgctggtattcctacttttgtaaagcagcattattgctggtaatacagcatcacgagttggtaaggcatgaagattctgctcgttaatacagatgtcgcttcctaataaaaaaccgccattggcttcaaaaccgacaatacgactataactccgcgataattcattaaaagcttcgataacataaggcgagccaatttttgtaagcttaacatgtttaaaaaagcggccagaagaaattatgctgttacaactaacaggaatagcgacggcttctgcatccaatgcaagtgaacataatagacctagtatatcgcctcttagccactcaccggcctcatcagcaataagagggcgatcaccatccccatctgtcgagaatatggcatctaaatcgaactctttagcccatgagcgagctttttcccgatcctctttgcttacagcctctgtatctataggtacaaaattatcgcttctacccaagctaacgacttcagcccccaatgcaataaataaaggcttataaagatcacgcccagcgcttgaatgttcgtaaataccaatacgcttatttttcaggaatggagtagaaaataaagatgtataacgagatatataattaacagcagccatttctgaaactatgagttctttaagctctaaatggctgcacgtatcttcaacactaaggatcgcagcctcatcatgtttcgtgatttcaccatcaggacgataaaacttgaggccgttccgctcgaatggaatatgacttcccgtaaccattatcgcaggcatattgtcagacatagactgaaaggccaaagctggggttggtaccactccataaaaaatacagttaacgcctttatccgccaatgcagcagcacacgcctgagccatcccataactacttggacgattatctattgccaatgctacggtatcaaaggaaaaatgttcctgcataacggcaacaaatgaaaccgtaaaagcagcacatacctgaggtgtaaaatcttttacaagaccgcgagccccactcgttccaaacacaatacctgatgaataaataacatcacggctattattaactacgttcattagtccactccttcgaaaatccagaacgttgttctaaacgaataatatcatcctcaccaagataggtacctgattgaatctcaattaacttcaggggggtcattccaggattttccagcgcgtgaatagtattcggaggaataaatgttgattcattttcagaaaccatataagtctgctctccctttgtaacacgagcagtcccggataatactatccaatgctcagcccggtggtgatgcatctgcgccacaaatttctcacccggcttaacagtgatacatcgaacgaggtaatttttgccgctatcaatcacattatattttccccaggggcggaaaacttcttgatgttgtttatattcgttcctatcattccgttttaaataatcgacaatttttttaacatcttgtactgtatctttattagccaccagtaaagcgtctgttgtttgaacaatgacaagattgcttacaccaatcgcacttataaacatatcttcggaataaatgtaattatcattacaagcatgtgcgaaaatatctccttttaaaacatttctctgatgatctttattcgatatatcccaaagtgaggaccaggaacccacatccgaccagccagcgctcattggtatcaccaccgcatgctgtgtgtgctccataactgcataatcgatagaatcactcgggcatgacataaactcttctttatcaatacgaataaaatcaagatcgggatttatatgtcctaccgccttttcacaagctttataaatttcaggtgataaatactttaattcgtttaaataagagcttgcacgaaataaaaacataccgctattccagtaatatttccctgatttgaaatagtcaccggcggtatcgatatccggtttctccacaaattcagccactgcataagcgtcatttcctatcaactcaccacgacgaatatatccataacccgtttcagcatgcgttggaacaataccaaaagttacaagcttaccatttgcagcgtattcttcagcatgtctgacagctttcgtaaaagctatttcatcctgaatcacatgatctgcagcaagaaccaacaaaagaggatcagcattatcagcattctggagcgcacaaaacgcggcaagagcgatcgctggtgcagtattacggcctaccggttcgagaataatattatttgctaacttgtcaatttcacggagttgttcagcgactaagaaacggtgtctgtcattgcaaatgacaacgggttcttctgtagaaagtgaagctaatcgctttatagtattttgcagcattgatagtttaccttcaacgcttagaaactgcttcggatgatattcgcgtgaaagcggccataaacggctacctgtgccgccagccataattacgggaagaaaagacatttattttatctcttttgacgaagaatattggatattattccaataactcttgtacatgctaaaatagcgacatgtagacaacggtaaagattgccaatgcttgcctaatttgtaacccaagaatttagcaaaggttgttaataaagctcttggaatccagaacggtgcatttttaagcaggaattgaatctctgattttacgaagcggaaaccctcaccaccggctccgccaaagtcacgctgaatccacggagaacaagcatgaaatacaccagtatcaaaatatcgttgaaactcttctcgcggggtataattatgggagtgtcttaccaccgcttcagcgcagtaggcgaccttataacccgcctgaatcatcttagccgccataaacatatcctcggcaagaattgtatgttcaggaaacccacttaactcttcaaaaacggaacggcgataggcagcaaaagaattggacataaatacagttttaatacccaatttttctatatctgccttacttttaacaatagattttgaactataattaaaatttctggcatgcactgcaaggggattagcatctttatgaggaagttgtctaccacaaaccgctgctatcaatggatctgaaaaataataaaccaaatttttaattgcatccgaatccgcgagaattgcatcttgcgttagaaaaattataacatcagcgtccagagtttttgcaactgctaaatttctggttcctccatgattaaaatctttagagtcaatattaaatattgatatatttttcaggtctgaggctaacggaaccgtttcatctttagaacctgagtctataacaatcaatttatccggatatatagtttgctgcttaatcgcatccagaacattaggccaaagcgaccctgcattatatgtgggaataattaatgttattttcatttattttgattccgccaaccaattgccaaccatctgcttcatattatcaaagtcataccgtgcgacatagttgttaaatcgggaaattgcatcaggcaactgctctatatttttaattgcactctgccagcttttttcatcatccggattcacatataatgcaccattggttaacacttcatgaaatactggtatatcggacactataactggagtatttgatgccatcgcttcaataggaggtataccaaaaccctcatcaatagatggataaacaagcgcgtaggctttagaatataaaatctttaattcattaaatgagacttcatgtaaaaaagtcactttatcttttagttccagatcaacgaccatttgttggagagacattgcatagtcagtacgaccacatacaataattaaattataagagtcagaccaaacttttttattttttatgaatgaatgaatatttttatgtggccaacttgcaccaacagctaaaaagtaattctctttttcttttttttgtataaaatcagatttattaacactattataaattactgatattttctcactatctacattataagttttagcaatgctatctttaacggtataagataccgttaaaacatgcttacatcgcttaacggacatttttaataaaaagcgaaaatacactttctgaataaaactatctggataataaaaaggtcttatatcatgtacggttatcgtttggtttctcagtaaggggatagtgtgatgtgtagtacacaccaattttttattaccaaacttaattaaaaccctcagcgcaagccagtaactatatacataccatactaatggtctaagtcgcgatgtttttgatgtgttgctaacaatattcggaacagtaactactgcataaccgagcttttcaaaataatcagcgtgtaccttgctacagattattgcgtcaacatcagctatttctcgcagtgccgttaaaaatttaatcgagtattgccacattcccgtaccacttttacctaaacgtgataggtttacgatcattgaatagctctccgtttttccatacgcatctttaaagcaataatcataaggataaataatattacgaagcttacactaggtgtaattcttaataatagagttaatgtaataccggcagtaaaacactacaaaaacaatcataaagaaatatattattatactaacattcccagaaaaaaacatctaagtagttaagctatccaaatttatttatatatatcaaatatgatttttcattaaaaagaaaagtcagtaacgtaaatctagctgaatccagaaaggttaaatctacatttaatctcaatataataacttactactacttaattatccgtttagtaaaattcttaagcacggtaatatttttcactgcatatgctagtttcccaaatcgaagtacagtgttgatcatatttttattacaacctagctttgcataaaattcagataaatctcttttttcatcactattgccataacatgccatagccaaagttgtatataaccatggtctctcttttagcaaaacattttcaaatgctcgttttaaagatatatttttactgtaaaaatcattagctaattttaaatatgcaataaaatcaattaaaattcgtctggcctttcctttcttctcgaaactatcattatctcctcggcatattacgagtggttttgatatataatgcaaaaggcaccctggcgtattaaatacgctcatcatgataaatacatgaggataggaagtgccaatataggacgcatcaaaatcaatggcatcccatcgttctttttttactattaaagaacttagatagctaaatacaccaccaatagataagcatctactgagatagatttccctatctaaattattattaaacacataaagttcatcatctgttctgagccaagaacgatgagggtttctaatctcaactaaatcacacccggtctcttttctgtcacataaatatatatctgcttgagaatcgagataagtttgtaatatcgctaacgagtctttcgcaagagcatcatcactgccaaatatccaacaataatccccattcgcaagggatactgaagcaagaaaattcctatctggcccaaggttaacgctattacgccgatatattattgggaaattataattgttcctccaaacatcaatcatttcctctgtaccatcagtagaggcattatctgatatacatatctcaatatctaaattaaatttttcctgattatttatactattcaacaactcttcaagatattcttttctattataagttggaatacaaaatgatataagcatatgattatcccttatttgccttaattaagtaagttagtggaagcccccaaaaaacagttaaagcaaaagatataatcaagccaagcagcactccactgattccaagcgtactagaaaaataccattgtgctattccaccaattattgcttgtagtggtactaatatccaaagtatttttaaataattcatactttgcaataacattgcataagtgtcacaccaaacgcgaatacagaaatatatgccaattaacataaaagataaaatagaaacttgataattaatatctttggctattactgaaaatatctgttctttaaataaataaataaatattgtacatccaacaacatatagtgagccaagcaaaatattgacacctatcattttgttaagttttttccattgctgtttgactctcaattcagcacatataggccataatgcttgcaaaatagcagtataaataaaaaagactaaaccaaaaattttcatcgttactgtatattgaacaatatcagcaggagttagcctttgagaaatgaccatataatctgtttgaagcaccactatcgataataaagtaaaaagaaaaaaccctgaagatctacgtaaaattgctatataatgagattttgttgttttaacatgataaagctttatgtatctatatacaatatagcacaatgaaatcatacccactggaagatacaggactattagtgataattttatgtcaactgagatccccctatagtatatatatagcaagccgagcatacctatcatataagataatgcgtttaatagattagctttccacccgaccaattcggcaaaaagtattttataagcaatagctccgattccaatagaactgaaaaccagacatgaggtaaaaaagagcattctggttttgtcctgtaatacctcatgaaaagaagaaagatatttagcggaaattaccccagaaaaaatataaaataaagcaataaaaaaaataatagctataaagcttagatgtaatgctgatttaatatatgcatcataacttttgtttttggctctgcattctgatatataattttgcagtcctgtacctatgccaaaatcaacagcgctacaccatactaataaaccagttaacaaactaaagattgcatatttctcttcacctagtatagaaataagatatgaaatacttgctaactgcaccccggcaattattattttggataaccatgatgaacctgcaacaattaaatgactcggaatttttaacaattgaactttcactatgcaattaaacgacttagtttttacaacataacgcgactaatttgttaacgatttatttattaaaagatcatgaaaatctcataaccgtttcagtagttcttcaattccttttttataatcgaaatttggtttccagcccattgcttttaaatttttattatttgctacagagaacattatttcattatctctttgctctatcgcaccaaattcaaatatactcgatgaacctggcatcatagtattttgcaaataaaccagaaaatctttcaaacttaccccagcaccagttccaacttgatactcagtatatgaaggtacttcttttctattttctaatatagttaaataagcatttaccacatcatctacaaaaataaagtctcttatctgttcgcctgttgtacatttcacgcaactctgttttttatttaagcagtcgataatgtatggaataaatttattttcaccatccccaggcccatatacatgctctaatcgcatgtttacaaatgaaatgtcatgcatattagcataataatgcccaatttcatcaaagtgtcttttagtaattatataaggccgcatatgttgataattaaaatctttcttggcaaaaaaactatctgtatttaaaaagatatccgcccgatattttattgccaaatcaagaagctttaatggttttataacatttgcatcttcaatatttatgagagatgatgttttatgcccatattctgttgccaaatgaatgataccaattaatgcagaatcaattgataactcctcgactaataattcgatattatcccaactgcaccatctaacattagctaatgcattactattattttttattacatctcgagtgattgcgacaactgaaatccccgatttttttagcgcttcgagtaaatgcttaccaataaagccggaagccccactgacaattacatattctttcaaaaaggtcatcgcaatcaccagatagaataaattgaattagaaattcaaaccaaagaactcttcaaacttgctaactacataatctaaatgctctgtagtcaagcctggataaataccaatccagaacgtttgattcattatacggtcggtatttgtcaactcacccactacacgatatttcacattagcaaaatacggttggcgaatcagatttccagcaaacagtaaacgtgtaccgatttttgcttcatcaaggaatttcaccagttcgacacggttaacaccgctagtttctttcagggtgatagggaagccaaaccaggatggatctgatttctctgttgcttctggtaattcgaggaattcagtgcaagattgcaagccctgtttcagataggaaaagttagctttacgctgctctacaaactcttctacgcgctccaactgagccagaccacatgctgcctgcatgtccgtgattttgagattatatccgaggtgggaataagtatatttgtgatcatagccttgaggaagtgatcccaattgctgaccaaaacgtttaccgcaggtgttatcgcatcctggcgcacaataacaatcccggccccagtcacggaacgactcaataattttcttcagttcacctgacttggtgaatacagcaccgccttcacccattgtgatatggtgagccggataaaaactaacggttccgatgtcaccaaaggtacctaccatctggccttcataagtcgtcccaagggcatcacagcagtcttcaatcaaccataagttatatttatcggcaatccgacgaacttcactcaggttaaatgcattaccgagtgtatgagcgatcattatcgcttttgatttctcagtaactgcagcttcaatgagagaggcatcgatattatatgtcgggatatcaacatccacgaataccggtattaaaccattctggatcgccgggttaactgtagtcgggaagccagcagcgacagtaataacctcatcaccaggtttgagagctcgctcgcctaattttggggaagtcagcgcagtcagtgccagcaagtttgccgaagagccagatgttgtcgttaaaacatgaggaaccccaataaattccccaagttttttttcaaaggcatcattgaaacgaccagtagttagccatccatcaagagacgcctcaaccatcaattgtaactctttggcaccaataaccttcccggaaggaggcacaacgcttgtacctgcaacaaaaggtttcgggctcaatgcctcattcgcatactgagcgacaagctgagagatttgctcacgcaggttatttgctgtcattactttgattccttaaacttattttcttaacgagtagttgcagacatatagtcgctgatttcacgctttgaacaaatcaacatatcttcgccgcgaatccatgctttatgccattttacgatgcgaccaagtgtttcagtcaatccccaacgcggatgccatcctaattgcatatttgctttagagcaatccagtttcaggtaatgtgcctcatgaggatgattctcaccatccagtaaccagcttgcatcatcaccccaaagcgtgaccatcttgtcaacaataaattcgaccgtcttcgcatcttcatcacgcgggccgaaattccatccttcagaaaacttagcaccttctgtatataagcgttgcgccaccacaatgtaaccagaaagaggctccagtacatgctgccagggacggatagaatatgggtttcgaataataacctgctggttattttcaaatgagcgcagaatatcgggaattaaacggtctttagcccaatcgcctccgcctatgacattaccagccctcacagacgccaaaccaacgccatgttgctcataatttgcaggattgaagaatgagttccggaatgcagacgcgactaattctgcacaacctttactattagagtatggatcgtaccctcccatgggttcgttctcacgatagccccacacccactcacgattgtcgtagcacttatcactggtgatatttacgactgcctttatgttacctacttgcttaactgtttcaagcaaatggacagtacccataacatttgttgagtatgtttcgattggctgttcataagataggcgcactaaaggctgggctgccatatggaaaacaatttctggcttaaattctgcaatagaattgcgcagcttttcaaaatcacgaatgtcgccaatatgagattccataagatcattaagacgcactatctcaaataaacttggaacagttggcgcatcaagtgcatagccttttacaattgcacccatttcagtcagccatagcgaaagccagcttcctttaaagccagtatggccggtaacgaatacacgtttaccttgccaaaaatttttatcaatcatctagttactcccaggttttccacggagctttacctttttcccacagcccttcgaggtaaactttatcacgtagggtatccatcggctgccagaaacctgggtgttcaaaagccattaactccccctgttgtgccaatgtcattaatggctcttgttcccaggttgttgcatcgttatcgatgagatcgataaccgatggattcaacacaaagaaaccaccattgatcattgccccatcgcctttcggtttttcctggaatgaccggacctgaccagctcggatatctaatgcgccaaagcgtcctggtggaaaagtagctgttaaagtcgctttcttaccgtgagccttatggaaatcgatagtcgctttgatatcaaggtcggcaacgccatcaccataagtaaacaggaaagcctcgtcatcttttacgtattcagcaacacgtttcagacgaccaccagtcattgaagaatcacccgtatcaaccaatgtgacattccatggttcaacacgtttatggtgaacttccatacggttttcagccatatggaatgttacatctgacatgtgaaggaagtagttcgcaaaatattctttaatcacatatcctttataaccacagcagataataaaatccttgataccatgcacagaatacattttcataatgtgccaaagaataggcttgccaccaatttctaccatcggttttggttttacaattgtttcttcacttagtctggtaccaagtccaccagccaggatgaccgctttcataaattatcctcaatattattagatgcggtaaatgcatcagaatagaaatgttctacagagagatttttcatcataaagtcctttttactggcatcgatcatcacaggtgaaccacatgcatatatatcgaagaactctagagaatcaaaatcatccatcacggcatgatggacaaatccctttcttcccccccattcggcgtcatcaccagaaacaacagggatataatgaacgttgtcgtgctgttcactccactgctgcggtaatgcagagtaaaaatctttactatattgcattccccagtaaatgtagatctcacgacgacattttccctgaatgagatgctcaaccattgatttaactggagcgaatccagtaccgcctgcaaggaagattataggtctgtcactttcacgaataaaaaatgttccgcaaggcccttcaatgcgcataagagtattttcttgtaactccccaaaaatgagcgaactcatctgaccattgggaacattccttacatgcaactcaataccattcgactcatcactattagcgatagaataactgcgagttacacctttataatgtaaattgatatactgccctggaaggaagccaatttttgctgttggtggtgtgcgtaacttcaaagtcataacatcgcctgaaaccagtacagcactatttaccttgcatgggacaattttttttgtctgtccagctagttcaggaaaaaaatgcgcatttagctcaagggcggttttaggtttacagcagcaggttagtattttatcaccctgtccaaaaatattacctttggagtcaacaacttctcccgccaacaaatcggactcacagataccacaatcacccgctttgcagctatgttcaagatggataccagccgatagcgcagcatcgaggattgattcatcctctctaccggaaaattcaatatttgatggaaaaatcttaataatatgagacacgatgcttactctgttaacaaggcttgatccagtaaaggtgctgcagcatcttttgctgaaagctcaggcagctgagaaaaaggccattcaatacctattgcctcatcattccatagaatgctaccttccgatgaaggtgagtaataattagttgctttgtacagaaactctgcatactcactaagagtaacaaaaccatgagcaaaaccttctggaatccaaagctgtcgcttattctcagcagacagatttacaccaacccattgaccaaaagtaggcgattcttttcggatatcgaccgcaacatcaaaaacctcaccgacagcacaacgaactaacttcccctgtgcattttctcctctctgaaaatgtagccctctgagtacgttctttttggattttgaatgattatcttgaacaaatgtaactttacgtccaatcaactcttcaaaggtctgctggttataactttcaaaaaagaatcccctctcatcgccaaaaactttaggctctaagatcaagacatctggtattgctgttttaatcacaatcatcacttataaacctttcaccatcttcagcaaatatttgccataatcattttttgataatggcccggccagttctataacctgttgtgcatttataaaatttttacgaaatgcgatctcttccgggcaggacacttttagcccctggcgttcttcgatggttgcaataaaattactggcctctatcaaactctgatgcgtccctgtatccagccaggcataaccgcgccccatcatagcgacagacaatcttccctgctccatatagatacggttaatatccgtgatttctaactcaccgcgagcggaaggcttaagatttttcgccatctccaccacgctattatcataaaaatacagccccgttaccgcgtaattactcttcggttgtaatggtttttcttccagactaacggctgtgcccttttggtcaaactcaaccacaccgtagcgctccggatcgtttacatgataagcgaagacggtagcaccactttctttattaacggcagcttccattaactttggtaaatcatgaccatagaagatattgtcacccagcactaatgcacaatcatcatgaccaatgaactcttcaccaataataaacgcctgtgctaagccatccgggcttggctgtactttatattgaagattcagcccccactggctgccgtctcccagcagttgttgaaaacgcggcgtgtcctgtggcgtactgatgatcaggatatcccgaatgcctgccagcataagcgtggaaaggggatagtaaatcatcggtttatcataaattggtagcaattgcttacttaccgccatggtcaccggataaagacgggtgccggagccccccgctaaaataatgcccttacgcgttttcatttccatttctcattcatagaaaatgccctgatgggcatttaaatttattagatggttgtcgtcgtaaacatttcagtcagcatacgcttaactcctaattcccattgaggcagaataaggtcaaaattacgctgaaacttttcagtattgagacgcgaattgcctggtctgctcgccggcgtcgggtaggcgctggtcggcacagcattaagctcagtcagcgcaagcgttatccctgctttgcgcgcctcgtcaaagactaaggccgcgtagtcatgccaggttgtggttcccccggcaaccagatggtaaagacctgcgacttctggtttatttaacgccacacggatcgcatgcgccgtacagtcagccagtaattccgcaccggttggcgcaccgtactgatcgttaatgactgaaagtgtctgacgctctttcgccagacgaagcattgtctttgcgaaattattgcccttacctgcataaacccaactggtgcggaagataaggtgtttagggcagttatcctgcagggccttttctcccgccagtttggttttgccatagacattcagcggcgacgtagcgtccgtttcctgccatgggatatcgccggtaccaggaaatacataatcggttgaataatgcactacccatgcgccagtttcgttggctgctttagcgatggcttccacactggtggcgttaagtaactgcgccagttctggttcagactctgctttatctactgcagtatgggctgctgcgttaacaatcacatcgggacgaagcttacgaacggtttcggcaacgcctttcggattactaaaatcaccgcaaaactcttttgaatggacatccagggcaatcagattccctaccggtgccagagaacgttgcaactcccagcctacttgccctgtcttaccaaaaagtaagatattcattactggcgtccttcatagttctgttctatccaactctgatacgccccacttttaacattgtttacccattgagtatttgcaaggtaccattccactgttttacgaataccgctttcaaaggtctccagcggtttccagcctaattcgcggctaattttacctgcatcaatggcataacgacgatcatggcccggacgatccgcgacataagtgatttgttcacgataagaagtcgctttgggtacaatctcatccagcagatcacagatggtaaataccacatcgagatttttcttctcattgtgtccaccaatgttataagtctcccctgccttgccttcagtcactaccatatgaagcgcgcgagcatgatcttctacatatagccaatcgcgaatctgatcccctttgccataaattggcaaaggctttccttccagtgcgttcaaaatgaccaacggaatcagtttttcagggaagtgataagggccatagttattagaacaattggtaacgatcgttggtagaccataggtacgccgccaggcacggactaaatgatcgctggatgcttttgacgcagaataggggctacttggcgcatatgccgtcgtttcagtaaataacggcagcgtaacgctgttttcaacttcatcaggatgcggtaaatcgccgtaaacttcatcagtggaaatatgatgaaaacgaaaattattttttttatcttcgccaagggcagaccagtatttacgcgcaacttcaagaagtgcataggtgccgacgatattggtttcaataaatgctgctggcccggtaatcgaacggtccacatgactttccgcagccaaatgcatcaccgcgtccggctggtactgctcaaaaatacgcgttatttcagcggaatcacaaatatccgcgtgttcaaaattgtagcgattactttcagaaatatcagaaagggattcaagattaccggcgtaggttaatttatcaatattaactacagtgtcctgtgtattcttaataatatggcggacaacagctgatccaataaaacctgccccgccagtaataagtatcttcacttttctattccataaggcgtatttaatgtggtatttaatttgccaataaaaattaattgctcaagtcgttacacacgctaccgcccctggctcatcagctaccagtgcactgcgtacatatcgacttgttgcaaacctcgcccagcagggcaaagctcactaaaacttaaacgctaattgtcttattaattgcatccggaaacaaggattaatcttataaaatcagcattaaaatgctccagataaccccttgttacttaagccctttatacaaaactaaaacggcagtcaacactcgtttcagccaacttgccgcttcgaatgttcactgccgttattatgtttatcaccaaccatttatcacggttgttaatacttattcatgcaaaagctgctctatgctcttacggaacttggctccttctttcaggttgcgcagcccgtacttcacaaatgcctgcatgtagcccatttttttaccgcagtcatagctgtcacccgtcattagcatcgcgtcaaccgactgttttttcgccagttcagcaatggcatcggtgagctggatgcggccccaggcgcccggttcggttctttccagttccgcccagatgtcggctgaaagcacataacggcctaccgccatcaaatcggaatccagcgtctgcggctgatccggtttttcgataaactccacaatccggctgactttgccttcattatccagaggttctttcgtctggataacggaatactccgataaatcacctttcatgcgcttcgccagcacctggctgcgacccgtttcattgaaacgcgccaccatcgccgcaaggttatagcgcagcggatcggcggtagcatcatcgataataatatccgggagtaccacaatgaaagggttatcgcccacgaccggacgcgcgcacagaatagaatgccccagccctaacggctgcgcctggcgaacgttcataatcgtcacgcccggtgggcagatagattgcacttccgccaaaagctgacgcttaacgcgctgctcaagaagtgattcaagttcataagaggtgtcgaagtggttctcaacggcgtttttagacgcgtgagtcaccagcacgatttctttgatccctgcagccacaatctcatcgacaatgtactgaatcattggcttgtcgacgatcggtagcatctcttttgggattgccttggtggcaggcaacatatgcatacccaaacccgctaccggtataactgctttcaaattcatcattgtttcttccacctgtaaaatggttgctgaattatagctctttagcttgttttcgccagcatgaattactctgctgccagggataatgatggcacgctctacattacgtcttagtcggcaccataacattaagtatgaacaactttttcccaggaattttcgtaaaaatagcggtacttaccctccccgcttcggcagcgaaaaattcactgcttcgacattcacggtttggtgattaatcctgtcgatatccacggaactctgcccgttttcattgatggcatgaacattagcgagggaaagcagcgtgtcctggcgggccataaattgaccacgtacatctttacgcaaatcgaaatgcatttttaacgccgggccaatcgctgaagtttgcatcacgttgatattgcgcagaaagaggtgctgcggttgattatgcagttccagcgtagcacgcgtcatccgtacattggtgatggcgacaaaagagggggtgttgccggaggaaatttgaatgccgcgtaatttataagcaacctggcgattatccaaccgaatagcgtttaatttaaagttttgcggaattgacaggtattttcctttaacgacgccatagccgatgagcatcccggcactattcgtcatatcaatattatcaatgacgaaattatcacagccataaattgcgatcgttgcgttatcaatacccgcatttttactgaaaccgggcgtgatgtttttggctttgacattgcgaatgacgaaatgtttgccattttctacgtgcacaagctgtcggcaatcagatccggtaatattggccaccacaaagttttttactgcctggtcttcaggataactgttgtcataggtgctacccgccagcccgatgccgatcccccagttgattttgccattggtacaattaatgcgttcgatgacatgatcggaaatcaggatgtcgcggtcgtgaatcgcgacattccactcaatggcgtccccctgtaaatcgctaaagcggctatgcgtaatccgcgcgccatccatttggttatgaaatccctggcggagaatggcgtagttggcgtgggtaacggtgatgtcatcgataatgagattacgcatcacctgcggttccttaccaccgatgaaaatttgcgcgacggggccaaagccgctcatcgccacgcctttaatcacacagtccgacccgcgaacatccagcgtcacattgtgcagactgccgccctgctcccccaccacctgacacccgtcctgcaaaataaaccgtccccggccattcccacgcaccgcgccctgtacccgcagcgtttttcccgccggaatcgttatcgccgcattgatattttcacacacccatcctggcggtacgaccacggtctgtccgtcggcgaaggcctgtttgaacgaggcgataccgtcatccgccggataatccttaatatcgacggtctcgcgaggttcacgcgcctgtaccggcaaggcgcgcagaaaaggaagaacagcaagcgcagaacctgccgtcaggagggtacgtcgggagaatttagtcgcgggcataccacctcgtttatatcgtttgtagcaggctggctaactggcgattaatcgcctgctgattaaaatcttgcgccactttttcacgggcgcgcgtgatcaccgactccagcgtgtcgtggtcaatccggctgaactcagcgagtcgggccgccagcgcctgcgcatcgttttccggcaccagccagccggatttgccggcctccaccagttccggaataccgctatgcacggtagataccacgggaatccctaccgccatcgcctccatcagcgctaccggaataccttccatatcgccatccgtaccggtaatcgacggcagcaaaaaaacatcggcgtcatccagcatcgccttcacttcatggctcggtttaaaccccggcatctcaatgacatcctctagctgatactgctcgatgagcgtgcgcagccgacgttcccacgggccaatccccagaatgcggtagcgaaacgccacgccctgtgctttcagttgccgacaggcttcaatcgccacatgcaggccttttttttctgtcaggcgcgcgacggaaatcatctccagcggcatccctggcgctttcaccgaacgatgggtaaaacgcgtcatgtcgacgcccatgcgcgaaacggcaatcttttccggcggacagcccatacttttcaggcgaccggcccacagatcgctgatgggcagcatcagatcgccacgacgaaacaactgctgatactccggcgtgtaatgactgagcacctcacgactagagatatcaatcccgtggaaaatagtcgcgattttgccgcgaagcacgcccagttcgcgtagtttggccgccgtcacgcccgccggaccaaagtgtgcgataaacacatccgccacaaaaggctggctcacctgcgcgcaaatcgcggaaaggatcaaattgcgtgattcatcgccatagcgggtaaaattgagcgctttccaggtcgccgcccgatgcagccccggcagcgttttacatgcccggtagcgcagtttcgccagccgtccctggggctcatcctgtaaccagcgggttttcgccgccaggccatacttctcccaggcggcgtgagtatgttgggtatcgcctttttgtaacgcgacaatctccacctcatggcccatatcaataaacgcagtaatctgattcagcacaaaggtttccgatgagagtggaaatttcagcagaaaaaagctgactttcattgcgcctcccgaattctgtcgagaacagatttgatcatcgtgaaccctttcgcccgctcctcggtgacggcgttagccacttttgcctttagcgcaggcaattgattgagcgtatcggccaccacgctttgtaatgaaccgttcagcaagtgacggatatcgatggccaattccgccaggcctagctgctgcataatcccggcggatttatgttcataattaatggcgatggcgggtgtgccaaaattcatggagataatggcggaatgcaggcgcgtcccgatggtcagtacgcaggaggcgaggatctttccgatttccacgtcattgagttcgtccatcgcgatatggaaattctctgagtcgtttacatacttcgccatccgtaacgcaaccatccggtcatcgcggttatagcgatcgatactggtgcaggttgacagcgccagtacctgataaccgtccgcaatcaggcgattcacgacctgggcaaatgcctgctcataggcctgctgagtggtgcccaggcgtttatcaaacggctccagatcgcgcaacgtaatcgcgacggttttgcggcgcgcggtgacgtccagccagtgctgcacagcataactggcaacaaactcgtcgtgacggcgttcgactaaccaggcggtatccaccccctgctccactttccgggtatcgatctgcgcggcggtcatcagatcgcggctgacggtttcacgcaggatcagcgcactggtgcgcccaaaaacataattggcgagctggttaaagtcaggattctggaaagggccgacgctatgtcccaccatataaattggtttgttcgccataaacgcgcacagcggatattcaaagtgagtcaaaccgtataagtcgacatagtttgaaccgcccacctgaatgacggcgtcatactgcgcaataaattgcgcgaattcggcaaattccggcgcgatagcaaaattacgcagcgatccttcctgggcgactttagacaataaaattttatgctgaaaacgacggcgtaatacttttttcacccgaccgttaagccctgccgccgcctgctgtttctggcttaactgatacagcgggtcggcaataatcgggcgcccctgcaaccaggcggaactcaccgggaaacggctcatcacatccatctccgcctctggcgcctgttgacggatggcatcaagcaaaccgcgcataatggcgctatcaccacggttgccgcatgtgtggttgcctaaaattaataatttcataaatagcctcttatatccccgtcatccgacacgtaataactttttcatttttgcactgccaacaagctgatttttaatttccatcaccagcgcattgcgtgaaaaaataatcattaaaataaaactcaaaataccgaccataacctgtagcgcgaatacccccgacaacggtaaataaccgtcgaccagctttcctgcgccgtagctggtaataaatgttggcaatgagagataaaacggtagccacaggctgagaatatactgacgatagctggagccgagtaccggcttaatcatcacgaaatagctcagaatggtgttgatgatttgcaccaccaggaaccccagcgtcacgccaatcgcccccgccagatggccgccaatgagaattgccgggataaacagaaacgttttaaagacgttgaacttaaagctgatatccacgcgcgctttcgccatcagcagcgaaccaatcgggttgccgaccgagcgcaacagccccaccacgcacagcaattgcaggatcgggataatgctgttccacttctcgccaaacactaacggcacaaaattgttcgccactaccatcaggcccaacagcgcgggaaaattgataattcccaccacggaaagcaacttatagaagttgacgcgcagcttctcggtatcgtcctggattttggcgaatgccggaaatagcacgcgagtaatgatggggttaagcttcgccggcggcacaacagccacgttgtacgcgaggttatatcccccggcgacgcttgcgccgagaattctcgccagtaccagcgtcgataaattcgtgttgatgtaattgacgatactgtccgccgtcagccacgcgccaaaacgcaggttcgtggacaccgatgccagcgaaaaatgcagccccggacggtaaatcttgcggccaaagtaaccaaacagcagcgttcgcaccgcgctgttcaccagatagccgagaatcgcggttagcgccagcggccagtaatgggcgctaatcaccgtaaaggtgaaccccgccagcacggaggtcgtttcgatcatgccgatcttattgaactccagctctttttgcatcagagcgcggaactgctgcccgtgagggatcacgataaacgccagcgacaacgttttgattaacggcgcgagatccgggttatgcaaaacatgggcaatcgcatcgctcagccaaaagaccaccgcaaataccacaatcccaagcccaacgtttagccagtaaagcgtggtcagctccagatgcccaatcgttttacgctggataatcgagttcgcgatgccaaagtccgagatcgtgtcggccagcgcgataatcaccagcgagacggtcaacaggccaaactggtggttgtcgatgatccgcgccagcaccgtcatctgaattaaccccagaccgataatcactatcgtggcgatagccgaccatttagcgccgctgatcgttttttgtcgtaaactcattcttttctccagaacctgttcacaaggcatcattggcgcagccagattgaatacggacagcgcggaaaaaccggagcgtacacgctgccctggtgcaatatggcaagtaaaatagccttgtgggtcaggttcttaatacgccgctttattaacaaaccctttaaaaatcgtcagaaaaacgattttgatatcgaaccaaatactccattcgcggatgtattccaggtcgaattccacgcgtttttccattttctccagcgtatcggtctcaccgcgccagccattaatttgcgcccagccggtgatgcccggcttcatcttgtggcgtagcatgtaaccttcaatcaactgacgatactgttcgttgtgcgccaccgcgtgaggacgaggaccgacgatggacatcccgccagttaatacgttgataaactgcggcaattcatccagtgaggtacgacgcaaaaagttacctacccgggtgacgcgcggatcgttttgcgtcgcctgggtaacgaccttatcgttctccatcaccttcattgagcggaacttccagactttgatcggcttgccgtccatcccgtagcgcgtctgacggaaaatcaccggcccgggcgagctcaatttgaccgccagcgcaatgcagcacagtaccggtgagatgagcagcagaatcagcgacgccagcacgatatcttctgcccgtttaagcagacggttaatccctgatagcggcgtgtcatatagcggaacgaccggaacgccgctcatctcctccacgcgcgagtggagaatattaaaggtgaacacatcgggaataaggatcaccgagcaggtggtgtcggccagctcgcgcaccagttttttcaccatggcgccgtcgctcatcgacatggcgatataaacattgtgaattcgcgaggctttcgcatcgtcaattaactgctcgaagttcccggcccagtcagcagagacgccgcccggtttgggatcgtgatagacgcccaccacctcaaaacccagccacggctcattacggaagctatccagcaacgcctggcccgcaggcaaatctccggcgacggcgacccggcgagtgttataaccacgattgcgtagccagcccgcgccgaaacgaataaatgaacggcataacactaagcccaggctggacaacgcataccaggccagccaggtggcgaggcggttgtcaaagtcatcattaaacgccaccagaccggcgctgaagatcaggctcagcgtccagttttgcagtaacagcgttaactctgtcgacattttgacgccgcgccaggagcgataaaaatcggttatcccgcccagcatttgaaaaacaaccagcgtaatcagcgccaccaacaggtgcatgtacaggaatggcagtccactgacttcacagatgaaccacagcccgccaaacatgatggtgatatctgaaaagcgttgcaccatagagattaacgatgcattggttttggctcgttcgcgcttttttagatttgtcatcgttgttcctgtgattggccccttacccgcaggcggtaaggggagatctgacgttactgattcagcagcgccagcagagtgcgtgttcgcgcttccatcagcggaatatcgccgcgtgattccacattcaggcgcaccaccggttcggtgtttgacgagcgcaggttgaaacgccagtcggcgaacgacatgctgaggccgtccgtgcggtccactgcctgcgcctcttccgcaaagtgcgcttccacccgcgcaatggccgccgccggctccgccagtctgctgttgatttccccgctcgccgggaacgccgccatccggtcgcgaaccagctcacccagcgactgtctcttcaggcacaccagctccgccaccagcagccacgggatcatcccgctgtcgcagtaggcaaaatcacgaaaatagtgatgcgcgctcatttccccgccataaatggcatcctccgtacgcatccgctccttgataaaggcgtgcccggtttttgacatcaccggcgtcccgcccgccgccgtcaccactgcctccgtgttccaggtcaggcgcgggtcgtggataatcttcgcccccgggtgtttttccagaaatgcttccgccagcagcccgacgatgtagtacccctcgataaactgccctttctcatcgaacaggaagcagcggtcgaagtcgccgtcaaaggcgatacccatgtccgccccgtgttcaataacggccttgcgggtgtcgtcgcgacactccggcagcaacgggttgggaatgccgttcgggaaggtgccgtccggggtgttgtggattttgatgaactccaccggcgcgcccagcgccttcaggcgcgcttcgatggcgtcaatgaccggccccgccgccccattgccggcgttaaacaccagcttcagcggggtgagattgttaacactgatatagccgagcaggtggtcgatgtaggcgtcgcgcaggctgatttgtctgtagctgccgcgcgcggcctcgttcaccggcgggaagtcgcccgcttccgccagacgctgaacgtcgcgcagaccggtgtcgccgcttatcgggcgggcgccctcgcgcaccagcttcataccgttgtagtccatcggattatggctggcggtcacttcaataccgccgtccacgccaaggtggaaggtggcgaagtaaatctcttcggtgccggacataccgatatccagcacgtcgacgcccgcgtcctgtaaccctttcgccagcgccagcttcagcgcctcgctgatcaggcgcacgtcgccgcccagcacgacggttttcggttttaaatattcgccgtaagcgcggccaatccgccacgcgatatcttcattgagctcttcgcccagcctgccgcgaatgtcgtaggccttgaaacaggttaattttgtcatgtgcttccccttcttcaggcaacagttagccctgaccgtaaatggccagcatcgttattgttattcattgccggatggcgcgttgcgcttaccgggcataattgcaggcgtcagacccgcccgtaacgatcctcgaaccgcaccacgtcgtcctcttcgagatacgagccggaacgcacttcaattaaatcgagcggtatttttcccggattttccaggcagtgggtcgcccccagcggaatatagatggactcgttttcaccgagcagcttaacctcgccgttgatggtgactctggcggtccccgccaccaccacccagtgctcggcgcggtgatggtgcatctgcaccgacagtccttcccccggcttgacggtaatacgcttcacctgatagcgctcgcccgcgtcgatggagtcgtatttgccccacgggcggtaaacctcgcggtgcatgtggtgctcatggcgtccgtcggccttgatcttctccaccacctttttcacgtcctgcaccgcgtggcgatcggcaatcagcacggcgtctttggtctgcaccaccaccagatccttcacgccgacggtggtcaccaggccggattcggcgtaaacgtagctgttttccgttttatggctgatgacgtcgccgtggtggacgtttccctccggggtgtgggcgctgatttcccacagcgaggaccacgagccgacatcgctccagcccgcatccatcggcatcaccaccgcgtccgccgttcgctccatcaccgcgtagtcaatggactcttccggacaggcgaggaaggcctcttcatccacacgaatgaagtcaagatccggatcgacgccgcgcatcgcctgttcacaggcggccagaatatcggggcggaactttttcagctcttccagatagcgtccggcgcggaacagaaacatgccgctgttccagtagtaatcgccgctggcgacgtaggcctgagcggtttccagccccggcttctcaacgaactgcgccacctcaaaagccaccgcatccgtcgcgcccggcacgacatcaccgcgccggatatagccatagccggtttccggcagatccggcacgataccgaaggtcaccagtttgcccgcgtcggcatagggcatggcgccgcgcaccgcgtcgcggaaggcctcttcattggcgattgcatgatccgccgccagtaccagcatcagcggatcgcagtccgtatgctggcgcgtcgccgccagcgccgccagcgcaatcgccggcgcggtattgcgcccggcgggctcaagaataatgttctccgtcagcttattgagctggcggagctgttcggcaacgataaaacggtgctgttcgttacagatcaccagcgggctttcgcactccacgccgttcagacggcaaatggtggtttgcagcatggtgagatcgcctttcaggcacagaaactgttttggataaagcacgcgagaaagcggccacaatcggctaccggagccaccggccatcacaaccgggtaaagttttgtctgacgcattatcatccccgaatatctgcaataaattggcgtagcacgttctctttattgagcgtgcgttcggcgtattcacgtgccgtcgtgttgtttttcggcatggcgagcgcctggctaatcccgttgaccagcgcgtcggtcgactccggttccacgcaaacggcgatgcccggatagcgcgcgcaaagttgtcctaattcggtgtgcggctcagcggtaatcaccgcattaccgccgaccgccagaatgttagtcagcttggagggcagtaccgcatccgccgcgccgcgcttttgcaccaccagatggcagtcgcccattttcagcagcgcgggtaaggcgtcgtaaggctgcagcgggaggaatttaatatttgccaggccgcgttcgcgggccatgttctccagccgcgccttgccgcccccctggccgacaatcgcaaaaatcaacggtcgatcgcgtaatcgttccgcggcgtcaattaccttttccagcccttgcttttcgccgatattgccggaatagagcacaatttttttgccctctggcaagccaagctgctgacgcaaagccgtcacgtcagcgtcattaacgtcctgaaagcgcgccacttccgaccagttcggaaaaaagaggattttttccgccgcgacgcccttttcccgcgctttattcatcatggagcgagagatggtcgaaacattatcaacgttacgcagcgcgctgcgttcaaaggccgtcgctaaccgcgctacgctgccgcgcttgccttttcccgccattcctaagccgagcatggcgtccacttcgtaatcctgaatatgcagtacggtacgcgcgccggagagtgtcgccagcagacgcattcccggcgtacaaaagagcgtcggtacaacgccgataatccgatccggcttccagcgacgctgcgccatcagtgggaaaaaactgctcaatgcaaagctccccagatgaagcagtcgttttaaggtggagggctgtttcggcacatacagcgggcagcgccagacggtagcctcgccctcttcccggcgatagcgccaggcggaatagcgctcaccgaccttccactgcgggtagtacggcggcgcagtaatgacccgcacctcatggccttcctgcgccatccacgccaccatttcgccggtatatttgccgataccggtcagttccggcgaatagttaatgccatagaccaggatcttcataggcccaccgccggcgcgtcaggagagaagtaggcccgactgttctcatgaacattgtcgcttgccagaagctgttccggcgtcagccagcggtaactgccatgctgggcatcaggcaggcgtaaatcgctctccgccacgcgcagacgaaagccgagcacgatgtagtgagttgaaaaatcctcaccggaaaagttgtcgtcatagaagtgctgccagacgccataaaacgtccctgccgccagcggcagacgcacgcccagttccgcctgcgtcaggcgtgcaaaggcggcctccagcgtttcgtctttgcacacccgcccccccggcacaaaccagtagccctgcgccggacggttgagacgctggcccagtaaaatttccccctggccgttttccacgatgaaatcgagggagatgaggggcgtggcccgcaccacggcggcgaaatcttcctgacgtaaaaacattgtcacccccggaaccgttgctgattctcaaggaaccactggtaagtaccggcaagccctgcctccagtgaaatttcgtgataccagccaagctgatgcaggcgcgtgacgtcgagcaatttacgcggcgtgccgtccggcttcgcggcatcgaacaccacccggccctggtaacccaccacctttgcgatggtctgcgccagctcgcggatggtgcagtccacgccagtgccgacgttaatgtgcgacagcatcggggcagtgttctcctgccacacttcgcgcgccagctccatcacgtgaatactggccgccgccatatcgtcaacgtgcagaaattcacgcatcggcgtgccgctgccccacaccaccacctccggcgcgtggctctgcgcagcctcatgaaagcgacgcagcagcgccgggatcacatgtgaattgtccgggtggaaattatcatgcgggccgtacaggttggttggcatcaccgaacggtagtcgcgaccgtactgccggttgtaggactcgcacagtttaatcccggcgatcttggcgatggcgtacggctcgttggtcggctccagcgtcccctgcagcagctcgctttccgccatcggctgccttgccagtttcggatagatacaggacgaaccgagaaacagcagtttgttcacgttgtgcaggtgcgcggcgtgaataatgttgctctctatcatcatgttttcataaataaaatccgccggatacgtgttgttggcgacaatgccgcccactttcgccgccgccagataaacctggtcgatacccgccccggcaaagaacgcctgtaccgcgcgcccgtcgagcagatccagctcatcgcgggtgcgcagtaccagttccacgtcgccgcgctgcgcaagctgccgtacaatggcggagcccaccattccgcgatggcccgccacaaaaattcgttgcttattcattctcaggactccagcgcgatggccacctcataaccgtgagatttcaacagtgagtgttttttcgcggcctccagatcgttcgccaccatctcggagaccatctccgacagggtgatttccggtttccagcccagtttctcatgcgctttggacgggtcgcccagcagggtttccacttccgccggacggaaataacgcggatcaacggccacaatcacatcccccggtttcacgcccggcgcatcgtgtccggtaacggataccacgatccctttctcattaatgccttcgccttcaaagcgcagttttatccccagttgcgccgctgccagctccacaaactggcgtacggaatactgcacgccggtggcaatcacgaaatcttccggctgctcctgctgtaacatcatccactgcatccgcacgtaatctttcgcatgaccccagtcgcgcagcgagtccatgttgccgagatacaggcaggactctagtccctgggcgatattggcgatggcgcgggtgatcttacgggtgacgaaggtttcgccgcgacgcggggactcgtggttaaacagaatgccgttacaggcgtaaataccgtaggattcacggtagttaacggtgatccagtaggcgtacagtttcgccaccgcatagggggaacgcgggtagaacggcgtggtctctttctgcgggatctcctgcaccagcccgtacagttcagaggtggaggcctggtagaaccgcgttttcttttcaagaccgaggaagcggatcgcctccagcaggcgcagcgtgcccatcgcatccacatcggcggtatattccggcgactcaaacgacaccgccacatggctcatcgcgcccaggttgtagacctcatccggctgcacttcctgtaaaatgcgggtcaggttggaggcgtcggtcaggtcgccataatgcagatgaaatttcgggttgcagctgtgcgggtcctgataaatatggtccacgcgctcggtattaaacgatgacgcgcggcgcttgataccatgcacctcataccctttttccagcagaaattctgccaggtaagacccatcctgtccggttacgccagtaatgagagcgacttttgacattttcatttcctcaaatagtcccgttagggagtaactttctgaacgcgctggcgcgttaccactgcgggattgccccgacaaatcgcatttgccggtaatgatttaaatacgctgctgcgcgcgccgacgacggtgccatgacctatcgtcacgccgggcgcgacaaaaacatcggtcgccagccaacatttttcgccaataacaatcggcgcggcattaatatcgaaatgggcgctggtataatcatggctaccggtacacaaataccctttttgtgaaataaccgcatgtgcgccaatattaatttcacccaacgtatataacacagcgtcgtcgcctacccaggcataatcgccgacggttaatttccacggataggtaatttttactgacggtcgaataaccacattctttccaattttggcgccaaacagacgcagcaaaaaggctcgccagcgatacaatatttgcggcgacccggcgaataatgtcgcctgtaccgcccaccataattgtacttttagcgcattagcgccgcggaaccccttcggcaccgtaaagccgctaagatcctgcataataactcccggtgattagactttgttataccgcgcttttgttttacccgtcgttttcagacgtaataaataggataattgcgcccaaaatcctggcacacgtaatatttttcgctgtacgttttttgcatcctgacataattccagattattcgaggttgacacgccgcccattgaaaattcagataccagtccgttaattcgccgaaaaggatagcctgctttatagagacgggccgccagcgcataatctgaagagacatgatattgcagatcataaggatacttttttaacgctgccgtcgggaaaaatatcgcctgatggctggctggcaaactatggtagatataatacccgggtttagccttccggcgtattttatgcccgccgccaaaatccagcagcgcgtcgccaatatacatcgcctcgcccttttgtcgcgccagttggcggacaaacagcgcggcatcatcatggaacgcatcaccggaattaagaaacagggtatagcgcccctgcgccaaggcaatgcctttgttcatggcatcataaataccgcgatccttttcactgataaaacgcaggttaaactcaccgtgacgtttttgcagaaattcgcgcgtgccgtcctccgaaccgccatccactacgatccattcaaatgacagacccggatcgcgcgccagattgcgcagcgagcgccaggtttttaccaccccttcgtaattgcgaaaggcgacggtaacgacgcttaaaaacatgcaaccaccccgttatgaaatttttaacgccttgcgcaaaatgaacggacagacgattaaaaaagcatattccgggctaaatattgaaccggtaaaaaacagcgacaccggcgtaaaaagatagagctgcacccgaaaattgcgattatcgccaaacgcatttagcgccatttttaaaactttccccatataccacagcgtcattagcactgcgaaccaggaaaaataaataatcagtagatacaatccattgtctatggttttcccgacatccgcaccgttaaagattccgaatgatgcaacatattcataaagtgagccaaatctgactacaccatcaatatgggtcaaggaatatccgaccatgactaaggggcccacaatacgataataagaagatgagccttccgtccctaaatcgccaagtcgtgtcgcgatataaggaaatgcaataattaccccaaccaaaaacagggttaatgagaccagcgccagtggaagttttttctttatcgcatccttattcaaatattggaacgcccactccagaaggtaaaacaggataaaggtcattacccctgaaaatgatcctgataatattatccctgccagaatcatagcatcgcttttcggtgttttgataccaaactgtttgatgctcagccaaattgagattagtgccaaagcgaaaaatgccggttcaaaataaagcgcagtggtacgcttaccgccaaattttatgaagttcagtacgtagctattactgtaaatgagatatttcgaaattccttccataatactgctgccgccggtaaggataatttgcgccatctccaccgcggcgagcgcgaccaccatacccaccaccagataaaaaaaacgcaaaatctttcggtggttatgcgcggaaatggttttgaatcggatactccagaccatcccgataatgaccacaatatagacaaacagcatcgtggacgtgacatatttaccggcattcagcgactggccgaacaggaagttaaatgccgtaagccccgcgccgatgcctaaggcgatcatcaatttttttacgctaatgcgttccacaaataacagcagcaacagcggtaaaaaagtgacgatggtaatgggaaagctttcccccagttgggcaatcttgacattgaccagtaggtagatcagcggcagcagcagatagctacagattctgatagaacgagacatactcctccagcatctgttgaccgctgtacgcgacgcggctacgcatacgaaaggcgtccagcgtggcgccaaataccgcctgagcaatctctggcttacgccgctgcgccaggcgcagtacatctgtagcggcaaaagtctggccgccggatttcgccagcacctcctgcgccgcctcgctgtgggtggcgattaccggtacgccgatcgagagcgcttcacacaagatcagcggatagttatcgacccgcgagctaaagaccagcgcatccatctcattgagcgcgctcattaatttgcgcttatcggtttcaaaaccgtgattaacaacgttttggccggtaaaaggcgaaaatttaccgaaggtatgcagttcaattttttcgcccagcgccatcatgtcgtgtaccagacgctggtcagttttgccgtcataacgcaagtcatgcgccacaatggcaattcgcggttttcccggattcagcggcacaggtgatagctgcgcgagaatcgcctcggtcgccagatcgataccgttgttaataatctggcagcgccccgcgccataaacgctgttaaaggcctcggccacgtgctggctcggcgaaataaaccggcagcccagccgcagcatgtcccgaaagcgctgacgtttgccgtcaataagctggtgcgcccgatccaccctaaccggcggataattgcttagggtcgggcatttttggcagccgcttttccagccctcgcaaccgtcggtgaaggcgcaacgcccggtgacgctccagtgatcgtgcaacgtccagaccagcgtgacgtctggtttttgcgctttgactttttcgcaaaacgtcacgatgtccgccaggtttagccagtaactgtggagaacatgaaaatgcagcaccagcgggccggatgtctggataaccgtgcggtaaagattgtcgagattgccaaacagatcgcgattcaggaaacgaaacagcgcgatattagcgattgccgtgccgcgcggcgtctgttttatcacctgcggataacggtggtggctgacgcttttttttccgcctttgccataaccataaacaaaatgcgacgtcagccctttttgcagcgcccgcagatggagatccaacgccactcccgccgcgccgccttccgccagccgtacattaaattgcagaatattcatgtgctgaccttcacccgtgctttttctcccaccaccagcgcatgatccggaatactgtcaagcaccacgctacccgcgccaatcgtgacgtgattaccgatagtaatatcgccaagcaggatgacattcgcccccagctcaacgccgttaccaatcaccggacaagccaggctgtccgcgccgcgattgccaatggtgacgccgtggcgaatggtaaaatcgtcgccggcgacgacatgtttgttgatcactaccgcgtaaccatgatggatagtgaaccgccgaccaatggtcgcggcggcctggatttcatacccgaacaggcattccgtgatcacgcgatacagcaccagcaccggcgcggcccacagattattcagcacattctttttgcgccagacggaacaaaaatgagcgatacggtaggccagcaccatgcaacaggggcgtaagctccagctattcgcgcgtaagtcttccagcatcgttatcgcccccgcagcccggccgccagacgtttgctattacgcacggagagcaacgtcagcaacgtgcgccaggtcattcgcttattgcgaatttggtacagggtaaaaagctggtattttttactggcgcgatcgaatttatctttgtgcttacgataaaaatggaaatagccggagaactttttcggcgaagaggtaatctgcatctcgccgtggttgatatgtaaaatttgcgtcgcctcttcgactttccacggttcgccatactccaccaccatgcgcagaaaaatgtcgtagtcctgcgccgccttgagttcggtatcgaacaaacacgctttaaaacgccaggcccaggtaaaaacctgattgccaataatattgcgcttgtagaataagcggcgcgaataaggggatttcggatacagcggcaggctggcaggctgagagtagacctcgccctcgcacacatagtcgttggcatacaaaaaggcgtgcgtagtcaactggtgtttatgggccagaaacacgctcagacggtttggcgtccattcatcgtcatcatcaataccggtaatgtagtgcccttgcgcctgcataatggcctggttgcgaaccgcgcaggcgccggtattcctggcgttatgggtataacggacgcgcgggtcgttcagctcctcaacaaattgttgtagctgctgataagatgaagagcaatcatccacgatgatcatctcccagtgacggtagtcctgacgtagtactgatttaatcgcccggatagccaactgctgcctgttccaggttggcatataaattgagatcagcggattgtctgttgtcatgcttattccccagatagttttgccgcatggcgctacgcttgtccggcctacagtctcaggccgcgccatccggcacgccttattttttatttggaatctgactggtattcatactcgtaatagccataatcctggtagcccgtcgcccggcggaaaatggagttgagaatgacgcctttgacctgaatgccattctggtcaaaacggctcagactggtttccacctcttttaaggtgttgacggcataacgcgccaccatcagcgtcgtcccggcgtggcgacccacaatcgcggcgtccgtcacggccagaatcggcggcgtgtcgattaataccagatcgtagcggctgcttgcccaggcgatcagctcgccgaagcgctcgctcatcagcagttccgatggattaggcggcacctgaccgcgcggaataagatcaaaattagcgatcgccgtgggtttcgcgcaggaggctatctcgcctttgcccgccagaatgtcagataagccgtccacgttattggtgccgagcagttcatgggtgtagcccttacgcatatcgcagtcgatcagtaatacccgtttatgcgtctggctgatgacggccgccaggttggcgcaaacaaaggttttgccgatagagggactgacgcctgtgagcatgagtacattattttgcgcctgcatcatggcgaaatgcaggctggtgcgcaggctgcgaatcgcctcaatcgccagatcggtcggattgcccaccgccagcagttggctctgcttgtaacgcttaattcctttaatggttttgacgctatcgcgcgctttttgccattccgacagcggaatactggcatagacgctgatcccgtgctcctccagcgcctgcgggctttcgataccgcgattaaacagcgagcgcagcagcacgccgacaatcgataacattaatcccagaataatgctgccgagaataatcaacgcctttttcggcttcagcacgcccggctgggtaatcgccgggtcaacgatgcgcacgtcgccaacggtgctggcttcggtgattttcagctcctgctgtttattaagcagttgcatatagacctgctggccggactccacatcgcgggtcaaacgcacaatctcctgctgggttttcggcattgccgtcacccgcccgttcagtttggctttttcatcttccagcgctttacgtttttccagcagggtgcggtaagccggatgcgctttggtaaagagcttggaaatttccgcctctttaaacgtcaactcattcaactgggcgtcgatattaaccatcgaatcgagcaccgccttcgcctccagcggtaaatccaccgagtctttatcctggcggaaagcgtttagcttgttttccgccacatccagacggctgcggacttccggcagttgttttgccagaaacgccaggctcttccccgcctcttcagatttccgcgcaatatcctgttgcagatagttacgggtaatactgttgagaatttcgcggatctggtcgcgatcctctcccgtgaacgtcaggctcagaacgccggtatctttgccggtttccgttacggtgaggttattttgcaggttattaatcatgccaagcgttgagaatttactcaccgtaaattctgtatcaggacgggcgtcaatcgcctctacccgcatcgtcacgccgtctttattgagtggctggcccacaacgccctgcgcgctaaatccgccgtcgctaaccaactgataacgtttgtcgcccagcactttgagggtgaagatctgtccgctcatcgtctctggtcgggtgaatgtcgtgactttcaccatttcattgtgacgtcccatcagccgttcccacccggcgccgaacagcggaaaggtgtttttggtgacggcaatatccagatccagatcgtcaacggtcttccccagcaccaggcgcgatcgaatgagctgaatttccgcatcggaagccggcggcttattcgctaatgcgctattgatatcctgtaccagcgaattaccggcgttttgttcaatctgtaccagcgcatcggcgctatagatgggcgtggcgaagaacgtataaattaccgcgcacagcgcaaatatggccgtcgtccccaacacccaccaacgcgcttcaatcaccgttccgaccaggcgcccgatatcgatttcatcgctacccgtaaccgccgcagattgttttgctttttctgtcatggttttccctgctctgcattcagtgcctgcgcccactggcgggcagacctttccagtaatgtgtacaccgcctcaaacgcatcgcggcttttgcgatacgggtccggtatttcacgctcgctgtcccagtgaccaaacagcattaccttgccgcgcatttccggcgcaatgtcgcacagggcggcgatgtgacgtttctccatcgtcagaatcaggtcatattcccggcacagacgcgcggaaatttgccttgcgcagtgattttccaaagacagatcgtgggcgctcgccacgctcgccgccgcaggatcggcgcctttgccgaccagtgcgcctaatcctgcggacgcaaccgtcagcgagggatgaaagcgttttagcaaacgttccgccgtcggggaacggcaaacattccccacacagaccactaagattttgttaaacataacgattaccaggaatgaatgtcgctggccgtatccgtcatataacggacaccgctaatggttggcagcaactgattgatcagacggttccagcgagcaaccggcgcggtcgtgacgtacaccacatcgtaaggctgaagtcggaattccgtcgccatcaccaatgacgtggcgtcagacatatcaagctggtagatattggcgatcttgccgccgcgtcccccctcgcctttcaacggacgaatcacaaaaatgccgctggcgttggaggtggtcagatcaatgccttccgcattgcctaatgcttcggtgagcgtcatgccgctgaaatccattttgagggtgctctgttttttcacttcgcccatgacaaagactttcagatcgtcattgcgcggcacatacagaatgtcgccagggtagagcaagcggttctggctaagatcgccattttgcatcagcgcctgtagcgaaatgcgctgttctttgccgttgtgcgtcaacacgacgttgcgccagtccgccatatcggtcaggccgcccgcagcgttaatcgcatccaggacggttagcggtacgttagtaatagcctgctgaccggatttattcacctggccggagatgtacgctttttgcgagcggaaagcggcgatattgacatccacctgcgggtccgcaatgtacttcgctaaacgcccggtaatatcgctacgaatctctgacaaagttttaccgacgacgctaaccttgccaatgtagggataaaacatggtgccgtccggctgtacccagttgccggtatcgcttgagctacggtactggcctgctggcgtggtcaattccgggtgatcccagacggtgacattcagcacatcgccaggcccgacgcgatactgatagctggcgatctcctggtccagcgacatattcggttgcgcgacattgggccgcgggcgtaattgctcaaccaaccgtggcgtcagcggatacacattgaccatccggtcgagatcaaagtcagcgtcttgctgtttgatcacatctttccccatcgtagacatattgctgcccggaagtactgtgcaaccacttatcaagctgagcgacgccaataatggcatcaatttcattttggatttcatcattgattatttatcactttggcagagtcattatcctgtgcaatttaaatagcggcttcgtccgtgcacatttaccttgcagttaatagcagagaaaattaactggcatcattctgaaaaaaaatcaattcatccgcaggctattgacagaataataaaggcttatattcaggctttcaggcacgctaccgcccctggcttcttagctaccaatacactgattattctaaattttcgcattcccctcagattttatcctcgttcagataaaaatcttcagcgaaataaaggttacgtattaatagttttctcgatgtcgtgacaggatatttaagcgcgctatcttaatcctgcaagaattgttgcagctaacctaatgacaggcaaggtaacaaacccgccattctatatttttaagattaatattaaatgaattaacagatgattttaggattttattgatgttgacaatatttatttactccactccacctgcgatatttcctaaatatattcttgacattatttagtttctgacagaaacattacggctattttaaagttattttatagccgcgtaacaaagataaattgcgctgcggcattgcatttttccgccgtattatccatgatcgaattgtgacaattgtcatattacagaaggtattgctcttactatggaatggattgccgatccgtcaatctgggccggactggtaacgttaatcgttatcgaacttgttctcggcattgataacctggtctttattgccatcctcgctgaaaaactaccgccggggcagcgcgaccgcgcgcgcattaccggcctgatactggcgatgatcatgcgcctgctgctgctggcgtcaatctcgtggctggtcaccttgactaagccgctttttagcgtacaggcgttaagctttagcgcccgcgatctgattatgctgttcggcggcttcttcctgctctttaaagccaccatggagctcaacgaacggctggaagggaaagatagcgccaaccctacccagcgtaagggggcgaaattctgggcggtggtcgcgcaaatcgtggtgctggacgctatcttttctctcgactccgtgattaccgccgtggggatggtcgatcacctggcggtcatgatggcggccgtgataatcgccattagcctgatgctgctcgccagcaagtcactgacccgatttgtgaacaaccatcccaccattgtcattttgtgtcttagcttcctgctaatgatcggctttagcctggtggcggaagggtttggtttccacattccgaaagggtatctgtacgcggctatcggcttctcggtgatgatcgaggcgctcaaccaactggctatttttaaccgccgccgttttctttccgctaaccatacgctgcgccagcgcacaacggaggccgtgatgcggctgattagcggtaaaaaagaggatgccgaactggatgcggaaaccgccgcgatgctggcagaccatgacgacagccagatttttaatccgcaggagcgcaggatgattgagcgggtgctgaatctcaaccagcgcaccgtaagtagcatcatgacgtcgcgtcacgatatcgagcatatcgatctcaacgcgccggaagcggaaatccgcgctctgctggaaaagaaccagcatacgcgtctggtcgtgacgggtgaaaatgaacaggaagatttactcggcgtcgtccacgtcatcgatctgttgcaacaatcgctgcgcggcgaaccgctcaacctgcgggcgctgattcgccaaccgctggttttcccggaaacattgccgctgctgcctgcgctggagcagttccgtaacgccagaacccattttgcctttgtcgtagatgagtttggctcggttgaaggcattgtgacattaagcgatgtcatggagactattgccggtaatctgccgaatgaagtcgaggaaattgacgcccgccacgatattcagaagaacccggacggttcctggacagcaaacggccatatgccgctggaggatttggtgcagtacgtgccgctaccgctggatgaaaaacgggaataccatacgattgccggattattgatggaatatttgcaacgcataccgcaaaccggtgaagaggttcaggtgggcgattatttgctgaaaacattgcaggtagaaagccatcgagtgcagaaagtgcagttaattccgctgcataacggcgagccagaccaggagatgtaacgtctgttcgcctgccccggcctgcttaccaggcaggccggaggcgcgttagcctcgccatccggctctgccctttggccaaaaactacagcttattcagcagcttcttcacatctttaccgttgcgggtatctttattgcgatccgcccagtcattgagccgacgcttcgcctcatcctgtaaatgcttacgcaataactgatccacttgcagggtatagttcagctcctgccacttgccatagacgcgcaacggcaccggcgtctctttcaggaaggtgatcaggttgctatcgccgttccagccgcccagcacacgcagattaaattgtgtatcacagctctgcttaaccagatccagcgttccgctgccggttaacgccagcatagaagattgcccgaccatgtcgtcgagcgtcagcgtgcccttatttagcgtcagatcggtcgtgaagcgatccagtcgggtcgcgttgtccatattttcctgcgactgctgcgcgtcgccgccgcttcgctctacggcctgctgcaccagttgctggaaattcattccttcaaggcgcgtattgctcatgtcaacatgcgcttttcctttccagctatggcgaaatgcctctgcgtcaatatccgccccggagaaatcgccaaccagcgacatcttaccggtcaggctaatcggataattgaaggctttcaggatagtcccaatctcaacatggttgaggcgagggtggaattcgatgcgcggactggcggtgcgggcgtccagcgtgccgggcagcgacatctctccgtcggccagtttcccctgcaaatcagtaatatccagcaatccggcctgattagacatcttcgtcgaaacctgggtaaagtccattccccgccagcgaactgaatccgcctgtaaagcaatctccgccgtaaagctttgcagcccctgataaggcggcgcaccaacacgcgacgcgataactggcctggtcagggggagcgtattttgcccctgcgacaccgcgccgcctgtctgagccacggcgctatgatgcggcaacaggttgtccagattaagcttgctggactggaggtcaatttgccattccggctgctccgccagcgttacctgaacttgcccggtcagagaactgtcattcgccgttaaatttaagtggttaaatgaaagacgtttttgcgcctcctgccactgcgcctgcaattgtccctgcccctcaatcccctgcgctggtagatccgcgccctgcaattgccagcgcagttgctcaatacccgcggttaaattatgcgggtaatcggaagcatccaccgttccgctgaacgataaagcaagatcccgctgatcgcggttcacgcgtcccgaaaaatcaaacgtgccgcgatgctcggcatcttgttccatattcagacgaatatcgcgcaccgtgacctgatcatcattttcatgctggaaaaccagcacgctgtcggcaacgcgcaggctacgaatatcaaacgaccagccgcgatcttccgctacgtccggcaaggtattatctttcggcgcgaccggcgcatcatcgctgcgtaccgcttccgtttgcggcgtcagttgaatcaccccgcctttcagcatcacctgcttaacatgaagctgatgactcaatagcggccataaagcaacatccaggcgcatattgtcagcccgcaccagcggttcgctggcgcctcgcgccgttagcgtcattcgcccggaaaggatactcagttgcggccatacgtgccagcgcagcggcccgtcaagttgcaactgatattcactacgcgcggcaacctgctgcaccatataggcgcggaaatcattcggattgaccaacaataccaacgcagagaatccggccaccagcacgaccaggagaatcatcagcgtcgtcagaaatcgtctcatgctaccctcaatggaccggcagtattgcgccgaatggctcagtctttatcaatccggctggcgacagcgccctgctgatcgcgatatttggcatcctgacggcggttataaggccgcgccgccgggccggacagcggctcaaaactcagcgcgccgatgagcatacccggacgcaacgccagcggcagcttcccggagttgtaaaactcaagcacaatgcagcccgaccagccgggatcgatacggtgcgccgtcacatgcaccatcagccccagacgcgccagcgaggagcgaccatccagccagcccactaaatccggcggcagggtaacggattcaaaggtaacggccagcgccaactcgcccggatgcagataaaatgcctcgccgtccggcaaaacgatttcatcgctcatcacgcgatccagcgccgcgctgacctcatctttaggcccgctcagatcgataaacgccgccgtatggccacggaaggttcgaaatttattgccaagacgtacatcgaccgtcgcgccgttaatgcgctctacgggaggtcgcggggtgatagacaaacggccttcatccagccaggcttcaatatctcggtcgcataaacgcatggcactttctcctttcgcgcatcaagcccttaaatcaagcacatcaagggctaaccaggttatcactgaacggtacacaattcgccagatttattcaaagaactggctgattttcgctttcagaatatcaatagcgatgcggtttttaccgccgcgcggcacgataatatccgcatattgtttggaaggctcaataaattgcaggaacatcggacgcaccgttttctgatattgcgccatcaccgaatccattgagcgaccacgctcgttcacatcgcgtttgatacggcgcatcaaacagatatccagcggcgtatcgacaaaaatagagaagttcatctcttcacgcaaacgcgcgtcggtcagtaacagaataccttcaagaataatcactttcttcggttctacgcgaaccgtttcctgcatacgggtatgctcaacataactgtataccggtaattcaatcgccgaaccgcgcttgagcgcctgaagatgctgaaatagcaggctgtgatccatcgcattcggatggtcatagttagtttttacgcgttcttccatcgacagatggctttgatctttgtaataactgtcttcgggaataacgccaatatgttcgtcacccacttgttcacgcaattcgcggtaaagggtactggcaataagactcttgccggaagccgatgcgccagcgataccgataatgacgcactgatgagactgatcagtcataaatttagcgacctgattaacctggatgtaaggaaggggggcgccgaaacgccaaacgcggcaattatagggatttcagcagcgcgataccagtccggcgctatgccacggtgaatttgttggcggcgcattcgacgtcgcgacgtaaaagcgttcagttttaacgcgggcagcggttttatcgacccgtctggaggaggaatacgccgggagccacaatttatattcagccagcgtataaatcattacgcgtttatactagcataatcacagagtaaactgacgcgtccggtattccgcgacgttaccggcgattcggatagagtggtaatgagtaaaccatcccaacatgttttcgttaccgtcccccacccgctattgcgtctggtcagtttaggcctggtcgcgtttgtctttacgctcttttcgctcgtattatcgcgtgtcggcacccaactcgcgccgctgtggttccccacctccattatgatggtcgcgttttaccgccatgcgggccgtctgtggccagggatcgcggtcgcctgctcgctcggcagcatcggcgcctcactgactttatttcctgccgcctcgcttaactttagctggacggcaataaatattatcgaggcggccactggcgcgatactgctgcgaaaactgctccccagctacaaccccttacaaaatttgaatgactggtttcgtctggctatcggcagcgccgtgattccgccgctactcggcggcctgttattttggctaatagcgccggaagcggtcgcctcgaaagcgtttctgatttgggtattatcggaagccatcggcgcgctgacgctggtgccgttaggtttactgtttaaaccacactatctgttgcgtcatcgcgacccgcatctgttgctggaaacgctattgacgctggtcattacgctggcgctaagctggctcgctatgcgctatattccgtggccgtttacgtgcgttatcgtcctgttgatgtggagtgcggtgcgcctgccgcgaatggaggcgtttttaatttttttagctaccgttatcgtggtctcgctcatgctggccaatgaccccacgctgctcgccacgccgaaaaccgacgtgatggtcaatatgccgtggctgccttttttaatgatcctgctgcctgccaatatgatgacgatggtgatgtacgcgtttcgcacggagcgtaaacatatcaccgagagcgaatcccgctttcgcaacgcgatggagtattccgccattggtatggcgctggtcggtacggagggtcagtggctacaggtcaataaatctctgagccattttcttggctatagccaggatgaattacgcacgatgacatttcagcaattgacctggccggaagacctgaataacgaccttgaacagctaaacatgctggtgcgcggcgacatcaacagctattccatggaaaaacgctactacacccgcaacggcgatgtcgtctgggcgctgctggccgtctcactggttcgtcataaagacaataaacctctctattttattgctcagattgaagacattaacgatctcaagcaaagcgagcaggaaaaccagcggttgatggagcgtattacacaggcgaacgaggcgctgtttcaggaaaaagaacggttgcacatcacgcttgactctatcggagaagcggtggtgtgtattgatgtcgcgatgaatatcacctttatgaacccgatcgccgagaagatgagcggctggcggcaagaggatgctttaggcacgccattattaacggttctgcgcattacgtcaggtgataaggggccgctgctggaggatatttatcgcgccgacaggtcgcgatcggacatggaacaggagatagtgctccattgtcataacggcggcagctacgatattcattacagtatcacgccgctcagtacgcttgatggcgataagattggttcggttctggttatccaggacgttaccgaatcacgaaaaatgttacgccagctcagctacagcgcaacgcatgacgccctcacccaacttgccaaccgcgccagttttgaaaaacagcttcaacagcgcctgcaaacaatacaggaatcgcctcaacatcatgcgctggtgtttatcgatctggaccgttttaaagcggttaacgacagcgcgggacatgccgccggcgatgccttattgcgtgagctcgcgtcactgatgctcagtatgcttcgatccggcgatctcctggcccgtctgggtggcgatgagtttggcctgttgctgccggattgtaatagtgacagcgcgcgctttatcgcgacgcggcttatcaacgccattaatgagtatcactttatgtgggaaggacgcctgcatcggatcggcgccagcgccgggatcacaatgataaatgaacataactgccagctcacagaggtcgtgtctcaggccgatattgcctgctacgccgcgaaaaatagcggtcgaggccgtctgaccgtgtacgaaccgcagcacgcattaacctcctcaaagagaatgatgccgctggaagaacagtggcatatgattaaaaataaccacctgctgatgcttgccagaaacgtcgcgccgccgcgtacgccggaggccaccagcttttggctggtctcactcaggctgtggaccagcgaaggggaagtgatggaagagcgcgcgttccgggcagggttagccgactccgcgctgcatcacgcgcttgaccgacgggtattccatgagtttttccaccatgcggcgaccgccgtcgccagcaagggattaagcgttgcgctgccgctgtccgccgcgggattatacagcgcgacccttattgatgagctgctggaacaactggagcatagtccactgccgccacggttattacacctgattatcccggctgacgttatcgttaagcaggcgcagaccgccgctgcgactctgcgaaaactgcggcaacgcggctgccaggtgattctcagccatgtcgggcgcgatttacagctgtttaatttactgcccctgcatatcgtcgattatttactgctggatagcgaccttatcgccaacgttcatgaaagtttaatggatgaaatgctgacctcgatcatccagggacacgcccagcatctggacatcaaaacgctcgccgggccggtacaaaacccacaggtgctggatacgctctcccgtattggcgtggatctgatttatggcgacactatcgccgaagcgcaaccgctggatttgttactgaataccagctatttcgctatccattgacggttgccagccgtgggtataccagatatgcagtagcgcgtaggaacgccacggtttccagcgctccgcgtagcgacggatctgcgcgggcgtcatcccggcgaagcgctgcttaattaagtaatcatcgggcaaaaagatatcttttgcctgccaaccgcgcagggcgaaatagttcgccgtccagcggccaattcccggaaacgtttgtaaatttttaacgctctgctcaatatccggcggcgcggcgagcgccagttttcccgccagcgtcgcctgcgccagatgaatcagcgcttcggcgcgccgcagcggcatccccagagctttaagcgccagcggatcggccaacgccagcgtttccggaccgggaaaacagacataatcgggcgcatccggcaacgcctcgccatagcggcgcgccactttcgccgtcaaccttgccgccatcgcgacactcaccagttgccccagtatcgcccgcacgccctgttcaaacgtatcaaccgatcccggtaaacgcagccccggtctgtcctcgcccagtggccccagcacggcggcaacctgcgcgggctggcagtcaagatcaaacagacgcgaaactttcgccagacacgccggcgcgacgggaagtaatccggcgctcacgctaacctgcacagtgtgggtgggcagatggggcctcacgctgaccagtccgcgatgctcgcccaccaccaggctgcgcgcataaaagccctcgcctactgtttccacgccgtccaccgcacgcgcggcaagaaagcccaacatccacgaccagtcgtaaggcggctgccagctcagggtaaacatacttttctcctttatttgacctttcagcataaacgctaatcgcacgtaacgccttgctttcatattccagttgtcgccgcgacgacatttcgctaaagtcacgccccttcttcactggcatggggattttaaggtgtttatcggatttgattacggtacggcaaactgctcggtcgccattatgcgcgacgggcatccacagttgctgacaatggagaataacagcgcattactgccgtctatgctgtgcgcgccgacgcgcgaagcggtgagcgagtggctgtatcgccatcatgatgtgccggcaacggacgaagaaacccaggcgctgctacgccgcgcgatacgctacaaccgcgaggaagatattgaggttggcgcgcaaagcgtacagtttggtctggcgtcgctggcgcactatattgacgatccccaggaggtctggtttgtcaaatcgccgaaatcctttttaggcgccagcggcctgaaaccgcagcaggtcgcgctgtttgaagatttagtctgcgccatgatggtacatattcgtcatacggcgcacagccaattgccggaggccattacccaggcagtgatcggtcgcccgatcaactttcagggactgggcggcgatgacgcgaaccgccaggcgcagggtattctggagcgggcggcaaaacgcgccggttttcaggaggtggtattccagtacgaaccggttgcggcgggcctggactacgaggctacgctgcgggaagagaagcgtgtgctggtcgtggatattggcggcggcaccaccgactgctccatgctgctgatggggccgcagtggcgtcagcgcgccgatcgtgaaaacagcctgttggggcacagcggttgccgcgtgggcggaaacgatctggatatcgcgctggcctttaaaaatctgatgcctttgctgggcatgggcggcgaaaccgaaaaaggtatcgccctgccggtgctgccgtggtggaacgccgtcgcgattaacgacgtcccggcgcaaagcgatttttacagtagcgcgaatggtcgtctgttgaacgatttggttcgcaacgcgcgtgaagcagacaaggtcgcgttgctgctcaaggtctggcgtcagcggcttagctaccgcctggtacgctgcgcggaagagagcaaaatcgccctttccggccaggcggatgttacggcgaggctgccatttatcagcgacgacctggcggtcgctatcagccagcaaggactggaagcggcgctggatcaaccgctgacgcgcattctggaacaggtgcaactggcgctggacagcgcgcaggaaaaaccggatgtcatctatctgaccggcggcagcgcccgttcgccattgattaaaaaagcgctttccgaacagttaccgggcatacccgtcgctggcggcgatgatttcggctccgtcaccgcaggactggcgcgctgggcggaggtcgttttccgctaagcgcctcgcaagcccagcgctgatggattgacattattcttgatgtggcttaacgtcaggagtgagggtaagggaggattcctcctccccctggtgtcttagtaagctggtaggctaatcactaagagtatcaccagtatgatgactaccttcatcataaccctttccttattttggccccttcctcgggaggggctttcccgtttcagcgtcctgctgaaatcggtggcttaccttcattgccgtgccgccactttaccgcactccggcgcgttaacgattttcaccgatgagagttgcgtagcgcctcgcaaagcgggtcgccattcagaataatcccgaccgtgttccataattcctccatttttctcccttccctgctgactacaatagaggaagcaacattccgcaaaacgtttcaggatgagaaacttataccgatgaaaggcagtaatactttccgctgggcaatagcgattggggttgtagtggccgccgccgcattctggttctggcatagccgtagcgaaagcccgaccgccgcgccaggcgtcgccgcgcaagcgccgcataccgcctccgcaggtcgccgcggtatgcgcgacggccctctggcgccggtacaggccgcgaccgcgaccacgcaggccgtaccgcgctatctgagcgggctgggtaccgtgaccgccgcgaataccgttacggtgcgtagccgcgtggatggtcaactcatcgccctgcactttcaggaaggtcagcaggtcaacgcaggcgatctgctggcgcaaatcgatcccagccagtttaaggtcgccctggcgcaggctcagggacagttggcgaaagataacgctacgctggcgaatgcgcgtcgtgatctggcgcgctatcagcaactggcaaaaaccaatctggtttcccgtcaggaactggatgcgcaacaggcgctggtcaacgaaacccagggaaccattaaagcggatgaagctaatgtcgccagcgcgcagttacagctcgactggagtcgtatcacggccccggtctcgggacgcgtgggtctgaaacaggtggatgtcggcaaccagatttccagcagcgataccgcaggtattgtcgtcattacgcaaacgcacccgattgatctcatttttactctgccggaaagcgatatcgcgaccgtagttcaggcacagaaagcggggaaagcgctggtcgtagaagcctgggatcggactaactcgcacaaattgagcgaaggtgtgttgctcagtctggacaaccagattgatcccacgacgggaacgatcaaaattaaagcgcgctttaccaatcaggacgatacgctgttccccaatcaatttgtgaacgcccggatgctggtcgataccgaacaaaatgccgttgtggtgcctgccgcggcggtgcaaatgggcaatgagggccactttgtgtgggtgctgaacgacgaaaataacgtcagcaagaagcgggtaaaaatcggtattcaggataaccgaaacgtggtgatcagcgcaggcttatcggcaggcgatcgcgtcgttaccgatggtattgatcggctgacggaaggcgcaaaagtcgaggtcgttgagccgcaaaccaccgtggcggatgaaaaatccccttcccgccatgaaggtcaaaaaggagcgcgcgcctgatgcaggtattacctccgggcagcacgggcggcccttcgcgtctgtttattctgcgccccgtggccaccactctgctgatggcggcgattttactcgccgggattatcggctatcgcttcctgcccgtcgccgctttgccggaggtcgactaccccactattcaggttgttacgctctaccctggcgccagcccggatgtcatgacctccgccgtcaccgcgccgcttgagcgccagttcggccagatgtcaggactgaagcagatgtcgtcgcaaagctccggcggcgcgtcagtggtaacgctacagtttcagttgacgctgccgctggacgttgccgagcaggaagtacaggcggcgattaacgcagccaccaatttattgccttccgacctgccgaatccgccgatttacagcaaagtcaatccggcggacccgccgattatgacgcttgccgtcacctcaaactcgatgccgatgacccaggtagaggacatggtagaaacccgcgtggcgcagaagatctcacaggtctccggcgtcgggctggtgacgcttgccggcgggcagcgccctgcggtacgcgtaaaactgaatgctcaggctgtcgccgcgctcggtctgaccagcgaaacggtccgtaccgcaattaccggcgccaacgtcaactcggcgaaaggcagtctggatggccccgaacgggcggtgacgctttctgctaacgatcagatgcagtctgccgacgaataccgcaggcttatcatcgcgtatcaaaacggcgcgccggtacggctgggcgatgtcgccaccgtcgaacagggggcggaaaatagctggctcggcgcatgggcgaatcaagcgccggctatcgtgatgaacgttcaacgccagcctggcgccaatatcattgcgacagcggacagcattcgccagatgctgccccagcttaccgaaagcctgccaaaatcggtgaaggtcacggtcctgtccgatcgcaccaccaatattcgcgcttccgtgcgcgatacccagtttgaactgatgctggcgatcgcgctggtcgtcatgattatctatctgtttttacgtaatattcccgccacaattattcccggcgtcgccgtaccgctgtcgcttatcggcacctttgcggtgatggtgtttttggatttttccattaataacctgacgctgatggcgctcactatcgccacgggtttcgtggtggacgatgcgattgtggtgatcgagaacatctcgcgctacatcgaaaaaggagaaaaaccgctggcggcggcgctcaaaggcgcgggtgaaatcggctttaccattatttccctcaccttttcactgattgcggtgctgatcccgttgctctttatgggcgatattgttggtcgactgttccgcgaatttgcggtgacgttggcggtagcgattttaatctccgccgtcgtctctttgacgctcacgcccatgatgtgcgcgcgtatgctcagccagcagtctctgcgtaaacaaaaccgcttttcccgcgcctgcgagcggatgtttgaccgcgtgatcgccagctacggacgtggattagcgaaagtgctcaaccatccgtggcttacattgagcgtggcattcgccacgctcctgctcagcgttatgctgtggatagtcattccgaaagggttctttccggtacaggataacggcattatccagggaacgctgcaggcgccgcaatcgtcatcgtatgccagtatggcgcaacgtcagcgccaggtggcggagcggatattacaggacccggcggtgcaaagcctgacgacttttgttggcgtagacggcgctaaccccacgctgaatagcgcgcgcctgcaaattaacctcaagccgctggatgcgcgtgatgaccgcgtgcagcaggtgatctcccggctgcaaaccgccgtggcgacgattcccggcgtggagctgtatctccagccgacgcaggatttaaccatcgacacgcaggtcagccgcacacagtatcagtttaccctgcaggccacgacgctcgatgcgctcagccactgggtgccaaaactgcagaacgcgctacagtcgttgccacagctctctgaggtaagcagcgactggcaagatcggggattagcggcctgggtgaatgtcgaccgcgacagcgccagccgtctgggtatcagcatggcggatgtggataacgcgctctacaacgcgttcggacaacgcctgatttcaacgatttatacccaggcgaaccagtaccgtgtcgtgctggaacataataccgccagcatgccgggcctggcggcgctggagacgattcgcctgacgagccgcgacggcggcaccgtaccgctcagcgcgattgcccgcattgagcagcgcttcgctccgctctccatcaatcatttagatcagttcccggttacgacattttcgtttaacgtgccggagagctattcgctcggcgatgcggtgcaggcgattctcgatacggaaaaaacgctcgccctgccagcggatattacaacgcagtttcagggtagtacgctcgccttccaggcggcgctaggcagcaccgtctggcttattgtcgccgccgtggtggcgatgtatatcgtgctcggcgtgctgtatgagagttttatccatccgattacgattctctcaacgctgcctacggcgggcgtcggcgcgctgctggcgctgatcatcgctggtagcgagctcgatattatcgccattatcggcattattttgctgatcggcatcgtgaagaaaaacgccatcatgatgattgacttcgccctcgccgccgaacgcgaacaggggatgagtccgcgcgacgctatcttccaggcctgtctgctgcgttttcgaccgattctgatgaccacgctggcggcgttgctcggggcattgccattaatgttgagtaccggcgttggcacggaattacgtcgcccgttggggatcgcgatggtaggcggcttactggtcagccaggtattaactctgtttaccacaccggtgatttatctcctgtttgaccgcctgtcgctgtacgtgaaaagtcgctttccgcgccataaagaggaggcgtagatgcgctttttcgcccttttcatctaccgcccggtcgccaccattttgattgccgccgccattacgctgtgcggcattctgggctttcgtctgctgccggtcgccccgctgccgcaggtcgatttcccggtgattatggttagcgcctcgctgccgggcgcctcgccggaaaccatggcttcgtcggtggcgacgccgttggaacgctctttgggacgcattgcaggcgtcaatgaaatgacctccagcagctcgctcggcagtacacgcattattctcgaatttaatttcgatcgtgatattaacggcgcggcgcgcgacgtgcaggccgccattaacgccgcgcaaagcttgttgccaggcggaatgcccagccgcccgacttatcgcaaggccaacccgtccgacgcgccgattatgattttaacgcttacctcggagagctggtcacagggcaaactgtatgatttcgcctctacccaactggcgcaaaccatcgcgcaaattgacggcgtcggcgatgttgacgtcggcggcagctccctgcccgcagtacgtgtaggcttaaacccgcaggcgctctttaaccagggcgtctcgctggatgaggtccgcgaagcgatcgacagcgccaacgtacgccgaccgcaaggcgcaattgaagatagcgtccaccgctggcaaatccagaccaacgacgaactgaaaaccgccgccgaatatcagccgctgattattcactataacaacggcgcggcggtacgcctgggcgacgtcgccagcgtcaccgactcggtgcaggatgtccgtaacgccgggatgacgaacgctaaacccgctattttgttgatgatccgcaagctgccggaggccaatattattcagacggtcgacggcatccgggcaaaactgccggaactgcgggcaatgatccccgccgctatcgatttacaaatcgcccaagatcgttcgccgacgattcgcgcatcgctgcaagaggtagaagagacactggctatctctgttgcgctggtgatcctggtggtgtttttattcctgcgctccgggcgcgccacgctaattcccgccgtcgccgttcccgtttcgctcatcggcaccttcgccgccatgtatctgtgcggcttcagcctcaacaatctgtcgctgatggcgctgactatcgcgaccggatttgtcgttgatgatgccattgtggtgctggaaaatatcgcccgccatctggaggcgggaatgaaacctttgcaggcggcattacagggtacgcgagaagttgggtttacggtcatctccatgagtctgtcgctggtggcggtatttctgccgctgctgttaatgggcggcctgccaggacgattattacgggaattcgccgttaccctctcggtggcgattggcatttcgctggtggtctcgctcacgctgacgccgatgatgtgcggctggatgcttaaatcaagcaaaccgcgcacccaaccgcgtaaacggggcgttggccgtctgctggtcgccttgcaacagggttacggcacgtcattaaaatgggtgcttaaccatacgcgtcttgtcggtgtggtttttcttggcaccgttgcgctgaacatctggctttatatcgccatccctaaaacattctttccggagcaggacaccggcgtgttgatgggcggtattcaggctgaccaaagcatctctttccaggccatgcgcggcaagctgcaggattttatgaaaattattcgcgacgatccggcggtgaataatgtcactggttttaccggcggatcgagggtgaatagcggcatgatgtttattacgctgaagccgcgcggcgaacgcaaagagacggcgcagcaaatcattgatcgactgcgggtcaaactggcaaaagaacctggcgccaggctgtttctgatggcggtacaggatattcgcgtcggcgggcggcaggctaacgccagttaccaatatacgttgctgtctgactctctggcggcgctgcgcgaatgggagccgaaaatacgcaaagcgctctcggccctgccgcaactggcggacgtaaactccgaccagcaggataacggcgcggagatgaaccttatctacgaccgcgacaccatgtcacggctgggtattgatgttcaggccgcaaacagtctgttaaataatgctttcggccagcggcaaatttccaccatttatcagccgatgaaccagtataaagtggtgatggaagtcgatccgcgctatagccaggatatcagcgcgctggagaaaatgttcgttatcaaccgtgacggaaaagcgattcccctctcttatttcgcccaatggcggcccgccaatgcgccgctgtcggtgaaccatcagggactttccgcggcgtccacgattgcctttaacctgccgaccggcacatcgttatcgcaggcgacagaggccattaatcgcaccatgacgcagcttggcgtcccctcgacggtacgcggcagtttttccggaacggcgcaagtcttccagcagaccatgaattcacagcttattttgatagtggcggcgatcgctaccgtctacattgtgctggggatactgtacgaaagctacgtccatccactgaccattctctctactctgccatcggcgggcgttggggcgcttctggcgctggaactcttcaatgcccctttcagcctaatcgccctgatagggatcatgctattaattggcattgtgaagaaaaacgccattatgatggtcgattttgcgcttgaagcgcaacgaagcggcggcctgacgccggaacaagccattttccaggcctgcttgttacgcttccgtccaataatgatgaccacgctggcggcgctgttcggcgcactgccattggtgttatctggcggagacggttcggaattacggcagccgctggggataaccattgtcggcggtttggtcatgagccagctcctgacgctctataccacgccggtggtgtacctctttttcgatcgtctgcggctacgtttttcgcgtaaaaatagcaaaccggtagtagagatatgacagaacttcctgacaacacccgctggcaactctggattgtggcattcggcttttttatgcagtcgctggataccaccatcgtcaacactgcgctgccctccatggcgaaaagcctgggggaaagcccgctgcatatgcacatggtagtggtgtcatatgttcttaccgtcgccgtaatgctccccgccagcggctggctggcagataaaatcggcgtgcgtaatatcttctttgccgccattgtgctgttcacgctgggttcgctgttttgcgccctctccggcacgcttaatcaactggtattagcgcgggttttacaaggcgtaggcggcgcgatgatggtgccggtcggacgcctgacggtcatgaaaatcgtgccgcgcgcgcaatatatggcggcgatgaccttcgtcaccctaccgggacagatcgggccgttactcggccccgcgctgggcggggtgctggtggaatatgcttcatggcactggatctttctgatcaatatcccggtgggaattgtcggcgctatggcgacctttatgctgatgccaaactacatcatagagacccggcgctttgatctgccggggttcctgctgttagctatcggcatggcggtactcacgctggcgctggacggtagtaaaagcatggggatttcgccctggacattagccggacttgctgcgggtggcgcggcagccattctgctctatctcttccatgccaaaaaaaactcaggcgcgttattcagcctgcgattgttccgcacgcccacgttttcactagggttgctgggcagttttgccgggcgtatcggcagcggtatgctgccgtttatgacgccggtctttttgcaaattggtcttggtttttcaccgtttcatgccggtttgatgatgatccccatggtgctgggcagcatgggaatgaagcggattgtggtgcagatagttaaccgttttggctatcgtcgggttctggtagcgaccacgctcggactggcattggttagcctgttgtttatgtcggtcgcgctgctcggctggtattatctcctgccgctggtactgcttttgcagggaatggtgaactcggcgcgcttttcttccatgaacaccttaacgctaaaagaccttcccgatacgctggccagcagcggcaatagcttattatcgatgattatgcagctctcgatgagtatcggcgtcactattgccgggatgctgctgggtatgtttggccaacagcatatcgggatagacagtagcgccacacatcacgtctttatgtacacctggttatgtatggcggttattatcgcgctaccggcgataatttttgcccgcgtgccgaacgatacacagcaaaacatggtcatttcacggcgtaaaaggagcctgtaatgaaagtctggcggcccggaatcaccggcaagctgtttctggcgatcttcgccacctgcatcgtgctgctgatcagtatgcattgggccgtgcgcgtcagttttgaacgcggatttattgactatatcaaacacggcaacgagcagcggctacaaatgctgggcgatgcgctgggcgaccagtaccagcaacacggcaactggcgttttttacgcaacaacgatcgcttcgttttccagattttgcgttcatttgagcatgacaacgaccgcgataaacccggccccggtatgccgccgcacggttggcgcacccaattctgggtcgtcgatcaaaatggccgggtgctggtcggcccacgcggtccggtgccgcatgacggtactcgccgtcccattctggtcaatgacgtcgaagtcggcgcgattatcgcctctcctgtcgagcggctgacgcgcaatacggatattaattttgatatgcagcagcggcgcgccagttggatgatcgtggcgttatcaacgttgctggccgcgctggcgacatttttgctggcgcgtggcctgctcgccccggtcaaacggttggtcgaaggtacgcacagactggcggcgggggattttaccacgcgcgtgactccaaccagcgctgatgagctgggaaaactggcgcaggactttaaccagcttgccagcacgctggaaaaaaaccagcagatgcgccgcgactttatggcggatatttcccacgaactgcgcacgccgctggcggtattgcgcggcgaacttgaagccattcaggatggcgttcgccagttcacgccagaatcggttacctcgctacaggcggaagtcggtacgcttaccaaactggttgacgacctgcatcagctgtcgttgtctgacgagggcgcgctggcttaccaaaaaacgaccgtcgatcttgttcccctgttggaagtcgctggcggcgcgttcagagagcgctttaccagccgggggctaacgctacattacgcgttgccggatagtatgaccgtcttcggcgacccggatcgcctgatgcaactgtttaataatctactggaaaacagtctgcgctacaccgacagcggcggcggcctgcatatttccgccgaacaacgcgacaaatcattattcctgacctttgccgattctgcaccgggcgtcagcgatgaacagttacaaaagctttttgaccgtttttaccgcacggaagtgtcccgtaaccgcgccagcggcggttctggactggggctggcaatatgcgtcaatattgtacacgcgcataacggtcatcttcacgccgctcattcgccttttggcggggttagcattacagtagagttaccgctggatcgcgatttacagagagaagtatgactgaattacccattgatgaaaacacgccgcgcattttgattgttgaagatgaacccaagctgggacagctgcttattgactacttacgcgcggcgagttacgcccccacgctcatcaatcatggcgacaaggtactgccgtatgtgcgtcaaacgccgccggatctgatcctgctggatctgatgctgccgggtaccgatggtctgacgctatgccgggagattcgccgtttttccgacatccccattgtgatggtcacggccaaaatcgaagagatcgaccggctgcttgggctggaaatcggcgccgatgattatatctgtaagccttacagcccgcgcgaagtcgtggcccgcgtgaaaaccattttgcgccgctgtaaaccgcagcgcgaactccagcagcaggatgccgaaagcccgttaatgattgatgaaagccgctttcaggcctcctggtgtggtaaagcgctggatttaacccccgctgaattccgtctgctaaaaaccttatcgcttgaaccgggtaaagttttttcccgcgagcagttgttaaaccacctctacgacgactaccgtgtggtgaccgaccgtaccatcgacagccatattaaaaacctgcgccgtaaactggaatcgctggatgccgaacagtcatttatacgcgcggtctacggggtgggatatcgctgggaagcggatgcgtgtcgcctggtataatgattattggcataacaataacaaggtcgtaagacgatattttccgccaacgctattctggcggaattaacacactgccctctttcctttggccgagcggtatcccgaaaaccacgacgaacgcgatcggggacaataaattatttggccgctctttttagtttaccgatatactgtgagtagttttttaaacttattgcgcattaattcattaagtgaatctaaaaatacataaacataataccagcttaattatacatggatttttatgacagaaacgtcatctcaccgctataaaccacgcaatataataaatgcgccaaatgtaaaatcgtctattttttcccggagccaacaacgcggcgacagcgaaattatccagcgctggttaagcaaccatttttatcgttggatcattggtgactttcctcatgtttatcctgtgcgctccgtcgccgattatgccgtttattttagcgctgatgcagaaatccccgcctggctggcgccaaagctgggtggcgatgagcgcttttactaccttaacgttcagcacccgcaacttgtggcgatggaaagagatttagtggaatttctttcgcgtcaggaaggaacgcggctggaaactaaactacagcgtatcaactgctttaccgtgctggcaatgcgcgaagcggagcatcaaaaaatgcagcgcctgcgtgaacaaggttggtatccctccaacagcgaggcgctaaaaccggtgatgacggtgaataacggcgtactggttgagcttgatgcaacaaaccccggcctgcgcagtgagatggcgtatgaatcctggcatatgcaacactgcgtcggagattttgataataaaggcgcgctttccggcggctacggcgattactacgcccggcaaattgaacaacagaaacttcgcctgttcagcctgcgcgacggcaataatattccccacgttacaataagcctggtggttggtaataacggcctgagcattgatcagattaaaggtaagcaaaatcgccatcctattaagaaatatgctaacgatgttttatctctgttacgccatctgcaaccacttcctgagcgccacgctgattgcgaagggatgggaatagtttatgaattgacgccggaatattcaggttggaaatttattacgcatattcatgacctcaattttctgctcaatgtgctgcatgacaattttcacttaatggaacacttccccactcccccggtagctttacagtggctgctgctgcacagcgccccggaggcgctgcgctaccttcaggttgttgatcctaacgtggcgacggctgcggaaatgctgtttccgcagcatgaatggcatcctacgcttgccgggaaaaacaccagtagcgaacctttcgaaattgaaagcctgacgctacaaaccacgcgctacctccctgtcatcaaggaggtgcaataatgttctggattgttcttattattgccgccctattttttagctggcgcaactacaaaaaaaacaaaccgctgattgcagcccgtatcgccgaggagaaagaaaaagatcgcctgaaagacctgcgtcgcgatacccgacggcggcaatgggcgctggcgctagctgatatcctcgcccggcgcaacgggctaccgatcaaaggcgttgagctggtatttaaacttgacgatgacaaacgccgctatctggcgcagcaggtaaaaaaagagctgggcttgagcgaaaacctcgacggcgcggcgttacgccacaaggtcgaggatatcttacgccgctggcctgcgggcatcggcagctcgccgcgcacgttttatcatcatctggcggcccagggccaggtccgcgacgcgctggctttcgactgcatgcgcaccgcctttctgacccgctgtatcgccgggctcggctggtgcgacgtacatcaggcctggctggtgttattacttaacgcccagcgcgctcaggactgttttgattcctgggaggattacgccaccgcctacgttcgcgcccgccgggtatggctcacgctacgtgacacgccaacagcgcttgccggacgggatttacaggaagccacccattatctgcaagaccctgtcagccgctggcgacaactgccgtggaatgaattcaaaattttcgagccgatttaaaggacgctttatggaacaggatgatcgtctgctcaacgctatgtttgagatgtgcaaccacaaaaatcccctcaatgacgggcaacgagagtggcatatcgccgatattcccggcctgctgcgcgaagaacgctatgacgaactggacgaacgctacaaccaggcgctgacggagagctttaccagccgcgaagcggaaaagcgctatttcttcgcctggaatcaaatggacaaccctttttacgatatggacacgctggttgaggctgggccgcaaggattagcgctgatcaaaaactggcagcgcgcccgtcctcgctccactcacgcctggcttgccgaggcgcaatactggaatcaccgtgcgtggctttaccgcagctatggctgggcgagagaaaccacccgagcgatgtggatctgcgccgccgcctgcaacgaacggatggtcatcgccgcgctcaatgccatcgactgtgaaccgcgccagtggatggcggcggccctgaccagcaccaactcaaaagtcttcggccagcccgagtggctggttgagttcctcgtgggcgcggatgttgccgggcagccattaatggaagatctggctgaatatcatcgccattcaccgcaggaggtggacgcgctgatggcccattccgggttgtcgtttaccgacgcggtttgcccaaatttgccgcgcccgtccgtgctgccggagtgcaatgacgatgccgggcaaaaatactggctcgccgtctgcctggctattttcccgacggcattttacgtgctggatgaatatatcccgtttcgtatgccacgctggagagggtctcacgaggaaatccgcgaatttctggaatcaagcgtatgcgatcacctttctgccgcagaacgtgaacatctggagctattgatctggtgggacgatcaccgcgatctgcgcatcaaagaggttgactccccggcagaacaggaacgtattatcgccaaagccgaagagattagcctgcgagcgcatatccaggaatctcgccacaacgcgctggagtggctgcgggtctgctatagcgatctggacgataatgacgcgctctggcgaacccttcagcgttcgatcgtggaaaaagttaagctcaacaattacttctctgatgacacgataaagttcgccctgcgcgattttcctgacacctggtggatgtataattttctctgtcagaatgcgcagcaaacggaattcgcagtgccgaaaatccgtcgtggctactttcagtacgccgggttattgggtttcgaaaaggatgaggcgcaaggcctcgcctggctcgatagcgtcgccgacattcaatataaccataactggcgggcggcgattaaaaatttcgactggttcgggctcccggaacatttcgtgccgctggcagagctgggcgcacaaagaaatatacccgccgcgctaaacttgctgggccttgaacacaataataaagagaacaacggcctactaccttacgatcctgccatcgcgttagggtattttcagcgcgcggcggagattttgcaccggcagttagcgctgcgcgagagcaccccgtacaaattaatagataacggaggctataccgactatgaaaatgacctgcaaaatattcatttcagcattggcatctgcaaccagcgtctgagtaaacaagaacctgataccgaaaaacgttccgcttatgaaaaagaactactcgataatctctggctggcgcatcagttcgggcataaagaggcctggggcttgttcctgctgaatatttttgaagtgaaggatattacgctggcgcataagcatctggaactggtgcaacaagaggccaacaaaggcacgctacatgctatggtgaccctatcgcgcctgcacggtaataaacacgatcgaacgctgtttaatatgaagctaagcgcacgctgggcgcattttgccttcacactttacccggataatgaaatcgttatggactgcctggaccacctgcatttcgattctttctggaaacgctttcgtttcgcctggtataccgtccgtatcccgaattcagagctgccgggacaggtcaactcaatggtgtaaggtggtttactcccctctcccacggcgctacaatgcccgcccttaaagtgaggactctcctcaagccgcctcatcaggtgaggcggatctgacctgtcatcagaacgagaaaatgatgtttaaaccagaactcctttcgccggcgggaacgctgaaaaatatgcgttacgctttcgcttacggtgccgatgccgtctatgcgggccaaccacgctactctttacgcgtgcgtaataacgaattcaatcacgaaaatttgcagcttggcatcaacgaagcccacgcgctcggaaaaaaattctacgtggtggtgaacatcgccccgcataacgccaagctcaaaacctttatccgtgacctgaaacccgtcgtcgagatgggcccggatgcgctgatcatgtccgatccagggttgattatgctggtacgcgagcacttcccggcaatgccgattcacctgtcggtacaggctaatgccgtaaactgggcgacggtaaaattctggcagcagatgggactgacccgcgtgattctctcccgcgagctgtcgctggaagagattgaggaaattcgccagcaggtgccggatatggaaatagaaattttcgtccacggcgcgctatgcatggcctattccggccgctgcctgctttccggctacatcaataaacgcgatccgaatcagggcacctgcaccaatgcctgccgttgggaatataacgtgcaggaaggaaaagaagacgttgtcggcaacatcgtgcataagcatgaaccgattccggtacagaacgttgagccgacgctcggtatcggcgcgccgacggataaagtgtttatgatagaagaggcccaaagaccgggcgaatacatgaccgcgttcgaagacgagcatggcacctatatcatgaactcaaaagatttgcgcgctatcgcccacgtggagcgcctgacgaaaatgggcgtccactcgctgaaaatcgaaggccgcaccaaatccttttattactgcgcccgtaccgcccaggtctaccgtaaggccatcgacgacgccgccgcgggtaaacccttcgaccctacgctgctggaaacgctggaaggtctggctcatcgcggctataccgaaggtttcctgcgtcgccatacgcacgacgattaccagaattacgagtacgggtactccgtttccgaacgccagcaatttgtcggcgagttcaccggtgagcgtaaaggccaactggcggccgtggcggtgaaaaataaattctccgttggcgatagtctggagctgatgacaccgcagggaaatatcaatttcaccctggaacagatggagaacgccaaaggcgacgctatgccggtggcacctggcgatggctataccgtctggatgcccgtcccgcaggacgttacgctggattacgcactattgatgcgtaatttctcaggcgaatcaacgcgtaacccccatgctaagtagttaattgcggttattttttcatggcgggaagattcttagaaattgatcacataccgcttcgctcaatgcgggtattattcaacgcgctgaaaaacataacccataaatgctagctgtaccaggaaccacctccttggcctgcgtaatctcccttacgcaggcttattttttgcgtataatccataaaaaagtggtacttcccgccatatccaaaattgaccacactaaccaaagcgcaaatgggcgcttaggtttagagacctcccctatccattgccagccagcaagtcacaatcctccccgcatccggtcggactcaggacttagcattgtgacgttaacgtttaaaatcagtgaattaaatcaataactactttgtgagcacttacacaaaaagtttccaggttattaaattaaggttaaaaactgataatttaagcgtgtaaaaatatggcacgttttaatgccgcttttacaaggattaaaataatgttttcccggattagaggtttgatttcatgtcaaagtaatactcaaaccatcgcacctacgctcagtccaccttcatcaggccatgtaagttttgctgggattgattatcctctattgccactaaatcaccaaacgccgctcgtttttcagtggtttgaacgcaatccagatagatttggtcaaaacgaaattcccattatcaatacgcagaaaaacccttatcttaataatattatcaatgctgctataatagaaaaagaaagaattatcggtattttcgttgatggcgattttagcaagggacaaagaaaagcattgggaaaattggaacaaaattatagaaacataaaggttatttacaattctgaccttaattatagcatgtatgataaaaagttaacgacgatttatttagaaaacatcaccaaactggaagctcagtcagcaagtgaacgagatgaggtcttgcttaacggggtaaaaaaaagcctggaagatgtcttgaaaaacaatccggaggaaacgcttatttcatctcataataaagacaaaggtcacttatggtttgacttctacagaaatcttttcctgctaaaaggaagcgatgcctttctggaagctggtaaacctggttgtcatcatctgcaaccaggcggtgggtgcatatatcttgatgcagatatgttacttactgataaactcggtactttgtatttacctgatggtatcgctatccatgtaagtcgtaaagataatcatgttagccttgaaaatgggattattgctgttaaccgcagcgagcatccagcattaataaaaggactcgaaattatgcacagtaaaccttatggcgatccctataatgactggctcagtaaagggttgaggcattattttgacggttctcatatacaagattatgacgcattttgcgatttcattgaatttaaacacgaaaatatcattatgaacacaagcagtttaactgccagttcttggaggtaatcatgatagccttgttttactcacccttcccaccgtcacgtataatcggtatccagagttattcctttatcctgtaaaatgtgatacagattctccattgatctaataactacctcaatttcacattcaagtttctctacagaactttcattgagtgagaagttgagagccagtaataatgattgtgagttattatcataacacaaatgtggtccattattctctgcaaaccataaattagcattgagaaattcaaaagcaagattattattatccggaggttttccgcaaaaaccgtatatcattatatactcactgttagtgcttgttagtaagatacggtaacggttatctataataaatgagcataatctgttttcgtcaaagacaattgaatcggtatttaattttagtgaaaactgtcttaataagcgatcggctcttgaatacataacaccccatactctatctaaagcgtttctatataagtcataagcctctggtctggacgattaacaccccgtgtcatcgtcggaattcgtcttttccctatgacttgctgtgtttgctcatttatggccaggctggccgggttctgatgccatttgcgctaaggtatagtccggcgcatattcccatcataccaattccccccatgccaaacgatgcgcctaaaaccgttagagcggtagtatatgccgcaccactactgacactggcgacagcccctgagcataccccactgaaaacacttgtaaacaatgccgtggttcccaggcacattaaacatctgggtttattgccgtaagcgttaaaatcaacgatttcagctaccggtttttcgtcattaccccgttcagaaggagggagcaatggcgtttgcgcattcacgcctgaagtgacattcatataaacctcttcatgcacatgcctgtttatgtttatgagaaaagcgatacatcaggcaacggtacgactataggacaccgcgctaagccatcatctaaataggttttatttgatatatagtagcgtgcttctaatagtgcgccgtgtttctgctaaagagtctaaagaacatttcgattttatgctattaaaaagtatgtttggtaataaatatcaggtttttatctgatattatggtgtttgaaattaatactgataactgacgtatgttcgtcttgttaattctccgtttcgttatcaaaggcgctatatcggaaagcgtctgactaccccttgtgatttccttgcactctcacaagcgctactcaatgcgcataccggcatctctcttgtcgccatttgccttaaaccatgcttcgcttaccgctgcgtacagcaggaagaaaaacggtaaagcaataagtgcgcaacatttcaattttcatcctgttctgacctcgctttttcatttctgctatacactttctggagattgttgttcaacctattaaggcataacggatggctaactttcccgccagcttactgatcctcaatggcaaaagcgctgataaccagccgctacgtgaggccattactctacttcgcgacgaaggcatacagattcacgttcgggtaacctgggaaaaaggcgacgcgcagcgttacgttgatgaagcccgtagactgggcgttgaaacggtgattgccggcggcggagacggtaccattaatgaagtgtcgaccgcgctcatccagatccgcgacggcgtagcccctgcactgggccttttgccgctcggcaccgccaacgattttgccaccagcgccggtattcctgaagcgctggacaaagcgctgaaactggcgattgccggaaacgcgatggaaattgatatggccatggtcaatgataaaacctgttttatcaatatggcgacgggcggttttggcacccgcattaccaccgaaacgccggaaaaacttaaagccgcattgggcggcgtctcctatcttatccacggtctgatgagaatggatacgctgacccctgatcgctgcgaaatacgtggcgaaaactttcactggcagggcgatgcgctggtgatcggcattggcaatggtcgtcaggctggcggcgggcagcaattatgtcccaccgcgctgattaacgacggactgttacagctacggatttttaccggcgaagagctgttgccggcgctgttttccacgctcacgcagtcagatgacaatccgaatattattgacggcgcctcagcgtggtttgatattcatgcaccgcatgaaatcacgtttaatctggatggcgaaccactcagcgggcaagaatttcatattgaggtgctgcctggcgcattacgctgtcggctgccgccggactgcccgttgctacgttaataacacctgtcgctggccggatgcgctcacatccggcttttcttcgttgaactcaggcgatggtgactttgctatccagatagacatcttgtacggcgttaatcaacttcacgccatcagccatcgatttcttaaaggctttacgtcccagaattagccccattccaccggctcgtttgttgatcaccgcggtacgaaccgcgtcgccgaggtcagtgtcgccgccgtccgcgccgccggagttgataagcccggcgcgtcccatatagcagttcgccaactggtaacgtaccaaatcgatcgggttatcgctggtcagtttgctgtacacgcggtcatcggtatagccgaagttgactgctttataaccgccattattctcggccattttctgtttcacaatatccgcgccaatcgtagcggccagatggttggcttgccccgtcaggtcagcggatacatggtaatcaacgccgtcttttttaaaggaagaattacgcaggtaagcccacaatacggtcaccatacccagctcatgcgcacgctcaaaagctgcggagatctcttcaatctggcgacgagactgttccgaaccgaaatagatcgtcgcgcctaccgccacggcacccatattgaacgcctgctcaacgctggcgtacagggtctgatcgtactctgtcggatagctcaatgtttcgttgtgattcagtttgaccaaaaacggaatacggtgcgcatagcgccgtgaaaccgaggccagtacgccgtaggtagaggccacgcagttacagccggcctcaatcgccaattcaacaatgttttttgggtcaaagtagcgcgggttagccgcaaaagaggcgccggcggagtgctccaccccctgatcgacgggcagtatcgaaaggtatcctgttcccgccaggcgtccagtattatagagcgtctgcatattacgcagaacggctggtggacgattattgtcaatcatcacccggtcaacataatccttgccgggtagataaagctgatcggaaggaatggtcatacaacgatgctgtaaaaggctgtcggcgtctttgccaagcaactgcgcaatatcagtcatagctatgctcccgtaagttccgatagggtatcggaaggtgaatagtcctgccccgcagattgcgggtcgcaataagcctggtactgaccgaccatttttgccaactttagcgcattttttcggcgctatctgctgactcgattcacgtccgaaaaagtgttagatcggtcaaaattaatgctcaatggtatttaaaaggtattattaaatggtattgtcatggcgtaccttacctgtcatgaaggattcaaaaatgaaaacgacctttaaactgtcgttcatgatgttcgtggagtggtttatctggggcgcctggttcgtccccctgtggctatggctaaataaaagcgggttttccgccggtgaaataggctggtcttatgcctgtaccgccattgcggcgatcctgtcgccgattctggtcggctccgttaccgaccgttttttctcagcgcaaaaagtcctggcggtactgatgtttgcaggcgccgtgctgatgtatttcgcggcgcagcaaaccaccttcgccggattctttccgctgcttctggcctattcattgacctatatgccgaccatcgcgctgacaaacagcattgccttcgctaacgtaccggacgttgaacgcgattttccacgcattcgcgttatgggaaccattgggtggattgcctccggcctcgcctgtggattcctgccgcaaatgttaggctataacgatatttcccccaccaacattccactgctcataaccgccgcaagttcagcgttgctgggcgtatttgcgttctgtctgccagacacgccgccaaaaagcaccggcaagatggatattaaagtgatgctggggctggatgcgctggtcctgctgcgcgataaaaactttctcgttttcttcttctgttcctttctgtttgcgatgccgctggccttctactacatcttcgctaacggctatctgacagaagtaggaatgaagaacgccaccggctggatgacgctcggccagttctctgaaatcttctttatgctggcgctgccctttttcactaagcgctttggtattaaaaaggtattattgcttggtcttattaccgccgcgatccgctacggcttttttgtctatggcggcgcggagacgtacttcacttacgccctgctgttcctcggtattttgctgcacggcgtaagttacgatttctactacgtcaccgcctacatttatgtcgataaaaaagcgccggttcatatgcgtaccgctgcgcaagggcttatcaccctctgctgtcagggattcggcagcctgctgggctatcgtctcggcggcgtgatgatggaaaaaatgtttgcttatccgcaaccggttaacggtctgacattcaactgggcgggcatgtggacgtttggcgcagtgatgattgccgtcatcgcgctactgtttatgattttctttcgcgaatcggacaaagagatcactgctattgacgatcgcgatattgcgttgacacaaggggaagtaaaatgaaagcagaacgtattctcggtgctctttacgggcaagcgttaggggatgcgatgggaatgccctctgagctgtggccgagaacgcgcgtcaaagcgcatttcggctggattgaccgctttctgcccgggccaaaagaaaataatgccgcctgctattttaaccgcgcggagtttacggatgataccgcaatggcgctctgcctggccgacgcgctactcgaatgcgaaggcaacattgatcccgagattattgggcgtaacatcctcgcctgggcggaacgctttgatgcgttcaataaaaatgtactcggcccgacgtcaaaaatagcgctgaatgcgattcgcgacggcaaacccatcgcggcgctggaaaataacggcgtgactaacggcgcggccatgcgcgtttcgccgttgggctgcctgttgccgccaactaacctgacagcctttatagcagaagtggcgttagcctccagcccgacgcataaatccgatctggcggtggctggcgccgtggttgtcgcctgggccgtctcacgagcggttaacggcgacacgtggcaaagtattgccgactcgctccccgccgtcgcccatcaggcgcagacagcgcgtattaccacgtttagcgcctcgctatcggcacgtctggaactggcgctaaacattgtccgccatgccgacggcgtcgaatctgccagcgaacagctctatcagatcatcggcgcgggaaccagcaccattgaatcggttccctgcgctatcgccatggtggaactggcgaataccgatcctaaccgctgtgccgtgctgtgcgctaacctcggcggcgataccgacactatcggcgcgatggccaccgccatttgcggcgcgttgcacggggtaagcgccattaacccccagttaaagcaaacgctggacgaggttaatcagctggattttgcgcgctatgccgttgcgctggcgagttatcgtcaacggcgggaggcactatgaacggcgcacggttgctgacattattaccgaccctgcatacccggcgtccgctcaccgttatcggcgcggcagtgatcgatatcattgccgacgcctggacgttgccgcgtcgcggaggcgatattgaactgcaacaacagagcgtcaatgtcggcggctgtgcgctgaatattgccgtggcgttgaaacgactggggattgacgccagcaatgcgctgccgctgggccagggcgtgtgggcggagaggattcgccgccgtctggcaaaagagggattatccagcgtgattgacgcggttgaaggagataacggctggtgtctggcgttagtcgaaccggatggcgaacgcacgtttatgtcttttagcggcgtggaaaaccagtggaatgcagactggttgtcgcagctcaggacaccgcggggcagtcttgtctacctgtccggctatcaactggcctcgtcctgtggcgaaccactgatccagtggctggaaaccgtcgacgatgtcacgccttttatcgattttggcccacgaatcggtgatattacagacgatgcaatggcgcgcattatggcctgccggcccatcgtctccctcaatcgccaggaagccatcatcgccgcggaacgcgccggacttgcgaccgatacgcgcactttcggcgaagcatgggtaaaccgcttttccgcgccgctggtggtgcgccacgataaagacggagcgtggtattttagcgcgcaatcttccggcgttgtgccagcgtttccggcaaccgtggtggataccatcggcgcgggcgacagccatgctggcggcgtgctggcaggactggcgtcaggctggtcgctcgcggatgccgtactgctgggaaatgcggtggcgagctgggtggtcgggcatcgcggcggcgactgcgcgcccacgcgcgaggcgctactcctcgcacacaaaaacgtataggtcgctacgacaataactgatgctgtattcaataggccgctgctgctgatcgagcgccacctgcttaatcaccagcaccggcactttaccatccatttgaatatgcgactgaaactcatcatccggcatccgggcgctgacgcgggatcgggtacgctgagggtaaatgtgctggcgacgaaaatagtcatacagagaaataccaatcgcgtcgacatcatgaatcagatgcgcgggcacccaggactcttcaatcgataccgcgtcctcatcaacataacgaatgcgtttgagtaaaaagacgtcgctgcctgcggggatcgccaggtgctgcgcgacctcatccggacaacttaccacgcgtttgttaacccatagcgtatccggttttttgccgcgcaagacaacctgctgagaaaatccccgcgcctctttcagggaatattcaaagatattattgatttgcgtaccgtagccgcgggcgcgcgtgacaacaccctcttcttccagcgcctgcatcgcttttcgtaccgtgatgcgcgagacgccggtaagctggctgagatcgcgttcgccaggcaaaatattaccgtgctcaagaataccgctgcgcacggcatcctttaccgtctgggcgaatttcatgtatagcggcgtattatccgccgctgaaattcgttcattcagttgcgcgatgagccgggtatgcgcttgttccatttatctttcctgacgacgggtctgtaggcagtatactaccaccacgcgtggaaatgatgtaccggaccaatgcccttccccacttccagcgtgtccgcctgcgccagcgccgccgaaagccatgccttcgcctcgtttaccgtctctccccaactgcgatgccggggccgtaacgccgccagcgccgccgacagcgtacagcccgtcccatgcgtatttttggtgttcacacgcggcgcgctaaaacgctgctcgccctcgcgggtaaagagccagtccgggctttgcgcatcctctaaatgcccgcctttcatcaataccgcttcacaccccatcgccagtaacgcccgcccctgcgccagcatctcctgttccgtacgcgcatggggcgcatccagcaacgctgcggcttccggcaaattaggcgtaatcagcgatacctgcggcaacagccggacgcgtaatgtttctatcgcagagggcgagagcagcggatcgccgcttttcgccagcatcaccgtatccagcaccacattacgtacatgatggcgctgtaaccgttccgccacggcctcgacaatatcggtttccgccagcatcccgattttcgtggtatcaatgcgcacatcgctgaacacggaatcaagttgagcggcaacaaagtccggctctatccggtacaccgactgtacgccacaggtattttgcgccaccagcgcagtgatgaccgaacagccatatgcgcccagcgcggaaaaggtcttgagatccgcctggataccggccccgccgctgggatcggtgccggcaatcgtcagcgcgttaattcgttgcattggccgcctccacatccagatgatagagcgcatcaagaaaagccgggatgaagctacccggtccttcgctacgctctgccgcggcctgtccagccagtttcatccagcagcaggccgacgcgacattgtccagcgcggcgcccggtaacgcgcaactggcggcgacgaccgccgacaacgcgcagccggtgcctacaatgcgagtcattaacggatcgccgccgggaatgctcagcgtgcgctgaccattagtgacgtaatctatctctccggtaaccacaacgatgcagtctatctgacgcgccagcgcctgcgccgcaggcagtgcggccaacgccgcctcggtggtatctacgccacgtccgcccagcgccatgccggataacgccaggatttccgaggcgttgccgcgtattgccgccgggcgcagggacaagagatccaggcaaaatcgccgacgaaattccagcgcgcccaccgcgacaggatcaagcgtccacggcgttttggcatcataagcgctttctaccgccgcacgcatcgcgtcagcgcgtgaggcagttaatgttccgacattaatcagcaaggcgttggcgatggcggcaaacggtctggcctcgacaggatcaatcaccatggcgggtgaagcgcccagcgccagcaacgtattggcggtaaacgtttgtacgacgtcattcgtcatacagtgcgtaagcggggagagcgcgcgaaagtgttttaacgtatgcgccgcaagcgtgcggcagtgcaggtcaggctgcatggttcagctcctgcccgcgtgaagaagggacacgagcagtgtcagacttccctacgctggcattatccagatcaggtggtacgggtatttctcagccttcacaaagaagggcaccccgagtcgtcaagccccaccgtgttaagcggggtttcgctattaagcatactgtctgtgccagacaatgtaaatttacagtcagcggcggacgataatttcagcgttatcagatagttctcaaaacctattcggttctggcaaacttgctggcggatatgttgctgcacgacgctttcgtttacactttttacgaaaaggggcgtgagataacaaaatagcgcttgtcagatacgccaccagcagaaatgatacacacgatgttaactgacccgcatatgtggagggtaaaagtatgaaaagtaagttgctgccttgcgcgctgttgcttgcaaccagttttgcatgggccgcccccgcgacaacgggcattgatcaatatgagttaaaaagctttatcgccgacttcacccacttcaagcccggcgataccgttccgcaaatgtaccgcaccgatgagtataatattaaacagtggaaattacgtaatctgcccgcgccagatgccggtactcactggacctatatgggcggcgcgtatgtactgattaacgataccgatggaaaaatcatcaaagcctatgatggcgagattttttatcatcgataaaaaaagccccctcatccagagggggaaatacagccccatgttacttttttattagcccttaatcactctatccccttcaaactgccttttttgttgactgccttcactacccgattcgctctggatctcgcccttttgaaactaccgcataccacattaaaatttattgcagaaagattgtcatcccggtcacttattattgtaagtgaccggaagttcattcacctatcgcgccatatatcttaaatgtttttcatatatattaatcgtatttcacatagatcagcgcagtcgcttttagatcgcctggctttatattgtctcggtcataaacataataactggcgataatagggattgttatcatatcactgttgagcggcgtgcctacttgatccactttccataacgttgaagcattaccctgctctgctgtatttgaaatattcaccgtttttccaccgctctccagtataaatccgacgccattattcacagcaccacgcaacacagaatagctatctggtattaaatcactgctggagagataaaccgtcattttacgcgatgtttgtttagcattaccaaaaagattatcacactggagtcgaatattatccgcggcatttttgttgctgaccttgcctgtgttatataattcagaaagcgcaatattcggtagcgtgatcgtcagatcttcaggtttgcaggttgtctgcttgcgatcgtaggacacaaacagatcaaatgaatataaccctgcacctctaagataactattataatctgcggcacaggcattccaacctcttcctgctagcaggcaccctaaaaaccgcaaaccggccgtaaactgagttgcagaagaagcgcttgttattgataccaccccgttgattaggacactgttcccactaccggcagaaatatttacattcgccccagaggaagcgggttcaaccgttaccgtatagcccgttgtaaacggcattgtgagagtattattatctgcccaggcgatttttaacttcagttttactgtatcattgtataatcccacgatgatatcggaaggatccatacgcgttatcttataagtccctgaacaagttgtatcgttaaaattatggctataagttgcggactgattagggttaatcgtaaaatcctcacgaataattaaattatcctgataagtaatttctcccgtacaggctgcgtatgtttcaggtaaaatcaataacatcacgataaaaagaaagagtttcatttcaccacctcaccactaccgacaaatataaactttactttcatcaaccgttttaccaaaggtgattgaacatgaaagcccctgctctttatctactggtacactgacttcgggcggaatatcattcgttcgaataaatagctgactaccttgtccaacaatgcccacattatgaccatgatgatctactacatcataaccaaaaataagaggcgaaccatcaggacgctgcgctttaataaaccatggtttacgctggtcggtatcaaaattcactagcacgacggcccctcggtacggggcggcaactttacggttaccgcgtaattccgtttcactgctactttgcgacacatcaagcataagatggttttcgcgatatggcgtaaggttgtcataaaccaccgttccttttttattggtggtccgatatttttggccgttaacgtaggctccttcaagtcccggagcctgcataatcgcaaaggtatctgaaagccggctggataaattcaacccgccactccaggctacaaccccaccggaaatacttccgccggtctgagtataattggacgactggctgtaactaccattaagcgttgcaacgggcgtattccaggttaaattcgtccccgcagtggtctcactatcgtgtcgctgatgactaacactcacgccgtaattaaattgatcgcgactgcctgccgtaccggttaaaccaatattgtttgaggtaaatccatcatcatcaaaggtcgtcgagttcgacacattcagatgacgccgcggggtagtaataccgtccccccagtcaaagggaattgaaataaacaggttaaaacgtttatcttcattatgatcctcgtcgtaagtctgactggcggataacgtataattaattttctggaacgtattggaatagcttatttgataatctttactggtgccgctacgtccccagtaatcacgccataatgcactcagtgatactgcgccccatccttctggcaaggattggctcacattagctgaaaacgtatttttacgcccaaaatcgttttgataataatcagcaatatcgtatacatcattcttatcgcgacgatagttatttttattattggcccagacatgatcgttaaatgtgcggtaatcctgtgatgaataccgatacgcagccagaccaaaccgagttaatgtttgggtcaggtatttattataagcaatctgataactctgaccatcaaatacatcgccattatcctgtttactgtgcgctcgcgtagcgtcaagcgaaatggcgccaatccgggtattccaccccgtgccgagggtaaacgcattataatggttcgatagcatcgtaccgccataaagcgtcaacaggttattaaggccatactgataactgatttgtgtaaaatcggcctgattatcggcgccttcaatatgactacggccggcggaaaaatcatacttagagacgccaggctgcaacatgttcggtacggaagcgtaaggcaccagccaggtatttatcgaaccatccgcctcacgcacggtgacatcaagatccgcgccaccgcccgcgagttgcagatccgcaatggaaaaggggccaggaggaacctctttctgataaacaacgaatccgttctgttcgatggttaccaaagcgttagtctgtgcaatcccctgcaccaacggcgtaaaattctgtttcgagtttggcaacatttgcatatcgcgaaacaggcgaacgccggtaaatctcacagaatcaaaaatctctgacgaggtatactgatccccggcgcgtaatgtgccgaggagctcagcgataccgcgctccagatacaatgtgttgcttttccactcaccgctgctgccatcggttttattaaatgtggtatccgcatgcgcttgccagcccaacagattgaaaccgctattgaaccgaacgtaagtactttcactactgccagaattcttatagtcactgtaatactggctggcatagtaagaagtataaaatgcattgatgccgcgatcccagttttcaggcaatacataacccgcctcgacctcatttacataggcctggggaacgctcaaatccagccgaaaaacgccaatattaaaagtatagccaccgcttctcacgacatcttttaacgcaatacaatccgttgctccctgcggttgcagaccatcgcttatcacaccaatatttttcaacaactcagttgaaatacacgtgctaccgggatcatcggcaacaatgatatcgtatttacctcgccattgattgttgacataaatatccaattcgtactgtcccggaattggcttattctcatccagatggaaatttgttattttttgatctctcattccccccaccataaaatgggtatcaaacgtttccgtcgcgatagcctgcgtttgccaggtaaacagagtcaataaaacaagcgaagcgatgggcgtcatccttagcatgatgaactcctgtttattttacattcattttgctactaatatagttaccattatcatcaataatcgttacttcatactggcttgttgacgcatatttcatgttaatattttgcgtcgatagcggtggcagcatgatagtttgatcattaatcttagtatttcctgcttttacatccgtcacggtaatccagtttgcagtatcatttttcatgatgacagctttattactgcgaaataaaccaatcctctgaaaactgtctttggttacggcggcaattcgactggggcgccatattaattttattcgattctgcattgcgaatttaagcacatttttaccggcgttttcctggctgtttggtggaatatcaagcacattcagataaaacagactttctttgttgtccggtaagctattaggcattttcttgattttgatctgctgaccagactcagcggcaacgcgcgccactggcggcgtcagcataaatggcacctgaattttttctggcggtaatgaagtgttaccgtcatcaatccaggactgtaccagcgaagcttgctcgccctgattcaccaattgtacaacgacttctttcttctctgccgggtaaatcacacgcgtaccataaataacaataccagcatgcgcaggcaaaattatggcagataataatactgcagataatattttcatatttacacggccttgcttataaaaaaccggcgacgaacgccgccggttgaataaattagtcagtaacaaccgttaaagtcagtgttgagctaacatcaccagaagcaacatcaccgtctaaacgcgcatagcgtgctaaaaaagtcaggtcgtattcaccgctgctatttggatctagtgtcacccccgtctctggatcaatctgattatccgtacttccgtagtaaaccgcaaaaccgacacctttggcagacccgttattaaatgtgatatcgtggctgtcaaattgcgttgaagagaaggtaatacgcggcgctacaccctgttgacattttattttcaacggcatctgagtttgattagttactgcgtcataaatctgacccggggttaaattaattattttatccgcaccaatttcattcagtctaatttcagcggtgttcgtacccaaaaattgacaggtagtaccaaccacctttccgttaatattcagaacgcctgaatcatactcatcaacagcaaaagccccagcgctcataaatacagcagacaatacagaagcagcaataagtgaacgtttcataatctcttccttaatgaagtaatttctatttgttaagagttattaacccttgcaacgaaaattctcatagacaggaagttatcgcaatgtaaacacgatgttttgttgatttaaaacaatttacagattgcaatataattgcaacaaataatcattgcttatcattattttgtaaacttattaatttccgaaatttactgcccttaaatataaacacaacaaataaaaaagcccatatcattgatatcaatgatatgggcctgcggaattaataagaattagtcgtaatgattaacaacaatctgtcgggtgctatcaccaggcaccgtgtatagctgcgttgtcacacctctcatcggcgtagcggcgggtgtttgcagagttgaaacgtggatagtgttgccgcaacgctgctgcaactgtgcgtttaccacttctgtactgcacgttggcgcggtcacttttccactgatggttaatgttgcggtgtcggaggcaaaaacaggtacgcttatcccataagccgaaactataattcccatcagcaaatattttttcatagtgagtaattgttcctctggtgaacgtcaaacagtatgcaggccgtcctgatgagcagtatgaacgtatcgataccttaaaaccaattgaaaaaataaatcagtaggataggtatgatcaattcaaataatgtttttgccgattatttcagataaacacctgtctgtttaagcaggaattaacaatgcgggggctattattttattaatacattcactgcatcaatatatattaatgcagtgaatgtcatattctctttggaatacgtcaggaggattacaccgcgcggaaggcgatttctcccggaatcacttcaccctgccagtaaagctgtgccgcaacgcgatcggccagttcgcgatagatcgcggtaaattcgctctccggacggctaaccaccgtcggcgtaccgcgatcaagatcttcgcgcagactaatatgcagcggcatctgacccagaagctgagtatggtatttttccgccagcttctgcgcgccgcccgtgccgaagatcggttcgtgatggccgcagttgctacaaatatgcatactcatattttccacaatgccgagcaccggcacttccaccttctcgaacatcacgataccttttttggcgtcgattagcgcgatatcctgcggcgtagtcaccaccaccgcgccggtaacaggaatgttctgcgccagcgttagctgaatatccccggttcccggcggcatatccagtaccagataatccagatccggccacagcgtctcctgcaacatctgcatcagcgccttactggccattgggccgcgccataccatcgcgttatcgtcagtcaccagatagccgatcgagttggtcgccaggccgtgagacataatcggcgccatatgcgtaccgtctggcgatgttgggcgctgatcttctgcgccaagcatggttgggatcgacggaccgtaaatatcggcatcgagaaccccgacctttgcgccttcagccgctaacgccagcgccaggtttaccgccgtggacgatttccccaccccgcctttaccggagctcacggcaatgatgtttttcacgccattaatgccaggctgatttttgacgcgtttcagcgtcgcaatgttgtacgacagtttccagtcgatcgcttttgcgcccgtaatacgtaacagatcggcgctgcattgctcttttaatacctcaaacgcgctgttccagacgaacggcatgaccagctcaacgtgcagcgtatcatccatccaggcgacgtggtgcaacgccttaagcgtggtgaggttatgcttcagggttgggtgctgaaaattcgccagcgtcccggcgaccatcgctcgcagggtatctggtgatttggcctgggattgttcgttcatcccgactccttttgtagttctgaaaagtacgattgtaactttgtagtttactccagcggtaacaattattcatttacggataaatgcccttatcgattggcgcagtaattaccattttggtactatcaaagcccttttttacaacagaagaagtaatacccactatgactcaagtcgcgaagaaaattctggtaacgtgcgcgctgccgtacgccaacggctctatccacctcggccatatgctggagcacatccaggctgatgtctgggtccgttaccagcgaatgcgcggccatgaggttaacttcatctgtgccgatgacgctcatggcacgccgatcatgctgaaagcgcagcagcttggtattacgccggagcaaatgatcggtgaaatgagccaggagcaccagaccgatttcgccggttttaatattagctacgacaactaccactcaacgcacagcgacgagaatcgcgagctgtccgagctgatttatacgcgcctgaaagagaacggttttattaagaaccgcaccatctctcaactctacgatccggaaaaaggcatgttcctgccggaccgatttgtgaaaggcacctgcccgaaatgtaaatccgcagaccagtacggcgataactgtgaagtgtgcggcgcgacctacagcccgaccgaacttatcgaaccgaaatccgtggtgtccggcgcgacgccggtaatgcgtgactccgagcactttttctttgacctgccgtcattcagcgaaatgttgcaggcgtggacccgcagcggcgcgctgcaggagcaggtggcgaacaaaatgcaggagtggtttgaatccggcctgcaacagtgggacatttcccgcgacgcgccgtattttggtttcgaaatcccgaacgcgccgggcaaatatttctacgtctggctggacgcgccgattggctatatgggctccttcaaaaatctgtgcgataagcgcggtgacacgaccagttttgatgagtactggaaaaaagactccgatgccgagctgtaccactttatcggcaaagacatcgtctatttccacagcctgttctggcctgccatgctggaaggcagccacttccgtaagccgaccaacctgttcgttcacggttacgtgacggtgaacggcgcgaagatgtctaagtctcgcggcacctttattaaggccagcacctggctgaaacactttgacgccgacagcctgcgctactactacaccgcgaagctttcttcacgcattgatgacatcgacctgaacctggaagactttgtccagcgcgtcaatgccgatatcgtcaataaagtagtcaacctggcctcgcgtaacgccggttttatcaataagcgtttcgacggcgtgctggcggctgaactggccgatccgcaattgtataaaacctttactgacgccgctgcggtgattggcgaagcatgggaaagccgtgaattcggtaaagctatccgtgagattatggcgctggccgacatcgctaaccgttatgttgacgagcaagcgccgtgggtggtggctaaacaagaaggccgcgacgcggacctgcaggccatttgctcaatgggcatcaacctgttccgcgtgctgatgacgtatctgaaaccggtactgccgacgctttctgaacgcgttgaagccttcctgaacagtgagttgaactgggatgccatcgaacagccgctgctcggtcacaaggtcaacacctttaaggcgctctacaatcgcatcgacatgaagcaagttgaagcgctggttgaatcgtctaaagaagaggtgaaagccgcagccgcgccggttaccggcccgttagccgacttcccgattcaggaaaccatcacctttgacgatttcgccaaaattgacctgcgcgtagcattgattgaaaatgctgagttcgtagatggttctgacaaattgctgcgtctgacgctggatctgggcggcgagaagcgtaacgtcttctccggcattcgttccgcctacccggacccgcaggcgctgattggccgccagacggtaatggtcgccaacctcgcgccgcgcaaaatgcgctttggcgtctccgagggaatggtgatggccgcaggacctggcgggaaagatatcttcctgttaagccctgatgacggcgcgaagcctggccaacaggtgaaataagcaacaagccggagcatgctccggcttttttaaccgcttaatcctgactggcatatcaccccatccgcgtgttttaactttttccttaataagcaatagcgttaagactccatatccggactgctaaataacggctaaaagtcatattctatctctccctgatacattgctattactgggttaaattaattcattgaaattattttaaaaacccaatcattatataaaatggagttttagatgaaaatttctggcaagttattgtccgcggctttggcttccgtactggtgttctctcttgctggctgtggcgataaagaagaatcaaagacctttaacgcaaacctggcggggacagaaatttcaattacttacacctataaaggtgacaaaatcattaagcagacgtctgaaagtaaaatcagctatgccactgtaggcgctaaaacgaaagaagatgccgccaaaattctcgatccgctgagcgcgaaatataaaaatatcgccggagtggaagaaaaattaacctatgaagatacctatgcccaggaaaacgtctctgtggatatggaaaaagtggactttaaagcgttacagcaaatctcagggacgatggtgtccggcgataccagcaaaggtatcagcatgaaacaaacccagacgctgctggaagctgctggttttaaagaagcgaaataactggcaggcataatgtattgcatcgactggtaaagtcgctcagggcgctgcttcggcagcgtcttttctttatgaattccgaaaaaagacagcctcgctgtaagtcccctcgccaaagcctataatccctgaattcttggccacaccaatacttaacgacaaggaattgttatgcaggttctacgtcttatggcactgccactattcgcgctctctctatcggttagcataactggctgcgatcagaaaaacgatactctccagggaaagcaaaataacatgacagcgtttatcaagaagatagccgctagcaaagagtcagaggaaacacaacgctatgtaggtaatctcaacggtattgaaatcaagttaacctattactacaaaggggatatcgttttacgtcaaatatctgaacataaactactttataagaccctgaaagccaataataaagaagaagcacaaaaaatgctgagtcaagtcggcgaagcttatcagggtatgccgggtttgactgaacgaatcgactattatgatagctatgctacggaatatgtggatattaattttacccaggcaaaaataagcgacctctgtaaattgccaggatcatcaattgacaactgttccgcgtactatctgtcaatgattcgctcgcagaaactgctggaagagagcggatatcatagaatcaattagtataataatgcgttttcccggtcagacaggacgctgccgggaacaataccgcagaattacttcgccgcgtgttcacgggctgccagaccgcgcagaaaataacgcataaactgatcgccgcattcgcggaagttcttatggtccggcgcgcgcatcatcgcggtgatctctggcattgagacacgaaacaactgaccggtaagtatcgccaggatatcatctgtttttagcgaaaaggcgatacgcagctttttcagcacaatattgttgttgatacgacgttccgccgtcaatgcaggcgccgcctcatctttgccgcgtttttcataaatgaggccattgagaaatgaggacaacacgatatccgggcaacgctgaaacccctcttcctcttctttgcgcaaccagattgcaatctgctccggcgtagcatcaacgttacccagcgccaggatacgcgccagatcggtattattagcttttaaaatgtagcgcacgctacgcagaatatcgttactcagcatgaggccttcggtcgtttctatggcaaaacgatattctaacagtcttttacaggccaatcgcctcttttaaacttttcagatagcgacggcttaccggcaccgtcaggccgttgcgtaaaatcagctctgcctgcccattatcctccagccgtatttcctgcaaatgggccatattcaccagaaactgacgatgacaacgcagtagcggcgtccggctttccagcgtgcgcagcgtcagctcggtaaacccctctttcccttcactgctggtcacataaacgccgctcatacggctactgacaaaggcgacatcatccatttgcaacaaatagatccggctgtgtccggtacagggaatgaatttaagcgcctgctggttttccggcaacaacgaaacatcctgtttactgcgctcctgacgcagacgatgtaacgttttttccagccgtttctcctctatcggcttgagcagataatcaaaagcgtgttcttcaaaggctttgatggcgtattcgtcaaacgcggttaaaaaaacgatatacgggcggtgttccggatcaagcattcctaccatctccagtccactgatacgcggcatctgaatatccagaaacagcacatcaggtcgcaacttatgtaccgcgccaatcgcttctaccgcgttcgcgcactctcccacaatctcaatgtcatcctgcccctggagcaaaatccgcagattttcccgcgctaacggctcatcatccacaatcagcactttaatcatgcgtcctcctccagtggaagtcgtaatgtaattcgggtaaaacagtccggctcgcaggccacgctaataccataatcatcgccaaagtgttcgcgcagacgtttatcaaccagactcatccccagcccgctactgccggcggaaggctgatacagtcccgcattatcctcaatatctaacatcaaatgctgcccttcgcgccgggcgcgaatagcgacgttgccggtatcaagcagttgcgacgtgccatgtttaatggcgttctcaacaatcggctgtaatgtaaacgcaggcaatttctgacgtgaaagcgtcgatggaacatcaagctgtacctgcagacgcgactgaaaacgcgctttttcaatttgcagataagcgtttacgtgttcaatttcatccgccagcgtgacgatttccgacgggcgttttaaatttttgcgaaaaaaggtcgacaagtactgcaccagttggctggcctgttcgctgtcgcggcgaatcaccgctttaatggtattgagcgcgttaaacagaaaatgcgggttcacctgcgcgtgcaacagcttgatctctgactgcgtcagcaacgccttctgccgttcatactgcccggccaggatctgcgcggataaaagctgcgcaataccctctcccagggtgcggttaattgagctgaacagtcggtttttcgcttcgtacaatttaatggtgcccatgactcgctgattttcgccacgcagcgggatcaccagcgtcgaaccgagtttacactgcgggtgtagcgaacagcgatacggcacttcgttgccatcggcataaaccacctctccggtttcaattgctttcagcgtataacctgatgaaatgggtttgcccggtagatggtgatcgtcgccaataccagtaaaagccagcagtttttcgcgatcggtgatggcgacggcgccaatatccagctcctgatataacacctgcgccaccttcatactgttcacttcgttaaatccctgacgcagaatcccctccgttgacgcggcgaccttcagcgcggtagcagaaaatgccgaagtatatttttcgaacatggcgcgcttatcgagcaaaatacgcatgaacagcgcggcgccaacggtattcgtcaccatcatcggcgcggcaatattactgaccagatgcaaggcatcgtcaaacggcctggctatcagtaaaatgatcagcatctgcaccagttcggcaatacacgtaattgctcccgccgtcagcgggctaaacactttgtccgggcgtccgcgacgtatgagaacgctgtgtaccaacccgcccaacagcccttcgacgatggtggaaatcatacagctcagcgccgtcatgccgcccatagaataccgatgtaacccaccggtcagaccgaccagcccgccgacgaccggcccgccgagtaggccgcccatcaccgcgccaattgcgcgggtattggcaatcgaatcttcgatatgcagcccaaaataagtgcccatgatgcagaagatagaaaacgtgacgtaacacagaagcttgtgcggcagacgaaccgtgacctgcataagcgggatgaacaggcgcgttttactcattagccacgcaatgaccagaaacacgcacatctgctgaagcagcagcaacaccagattaaactcgtacatacccgcaaaccacacttcaattaaaagcgcgtaacatacattgagtacaattaactttctttgaactgttgcataaaaatatgaattcgtgaatacgatcacttaaacgccgcgccgcaacccgctacttcgcgttttaatgcataaaaaacaggcaaaacttcctggttcctaaaagagcgtctaaagttaaaccgggacctcgcgagcaagggtgaaacgatggcgctttacacaattggtgaagtggctttgctttgtgatatcaatcctgtcacgttgcgcgcgtggcagagacgttatggacttttaaaaccacagcgaacggatggcggtcatcgtctgtttaacgatgccgatatcgacagaatccgcgaaatcaagcgctggatagataacggcgtccaggtcagcaaagtcaaagtgctgctcagtagcgacagtagcgaacaacctaacggctggcgcgaacagcaggagatcctgctgcactacctgcaaagcagtaatctgcacagtttacggttatgggtcaaagaacgcggtcaggattatcctgcccaaacattgaccactaacctgttcgtcccactgcggcgacgattacagtgccaacaacccgcccttcaggcgctgctcggcattcttgacggtatcctgatcaactatattgcgctctgcctggcgtctgcgcgtaagaaacagggaaaagatgcgttggtgatcggctggaatatccatgataccacccgcctgtggctggaaggttgggtcgccagccaacagggatggcgaatcgacgtgctggcgcattcgcttagccagttccgcccggaactgtttgacggcaagacgttactggtatggtgcggagaaaaccagacgctggcgcagcagcagcaactcctggcatggcgcgcccagggacgcgacattcatccccttggcgtttaaacagaagctaacaaattcgctttaatgtatactccttttattaacataaggagtacataatgcgcgtagcgaaaatcggggtgatcgcccttttcctgctgatggctattggcggtatcggcggcgtgatgctggcaggttacagttttattttgcgtgccgggtaagcacgcgcgtcagcctttcaaacaggcgatcgataatgatcgccgccagcgccaccagcagcgccccctggataacataggccgtattaaagccgctaagcccgataatgatcggcgtgcctaacgtactggcccccaccgttgaagcgatggtcgccgtaccaatattgataatcaccgaggttcggatgcccgccagaatcaccggcgcggccagcggcagctcaacctgatacaactgttggcgacggctcattcccataccgctggcaacgctcatcacgctggcaggcaccgcgcccagcccggccagggtcgcctgcaggatgggcaacaccccatacaggatcaaggcgataatggccggttgctgaccaaaacccatgacgggtaccgcgatcgccagtaccgcgaccgggggaaaggtctgcccgacggcggcgatagtctccaccaggggacgaaactctttcccactttctcgcgtgaccgcaatccctgcgccgacgcccaccacgacggcaaacaaacttgagatgcccaccaaccagaaatgggcgagcgcgagggcggcaaaactctcctgttggtagaccgggcgcggtaaatcgggaaacagcgcggcgaagaacggctggctataaggcaatccaaacagcagaagcaagaacagaacaataagccagagaagcggatcacacagtcgtttcacggggggacgtctccgaaagcagatcgcggaaatggagcgtaccgcagggctcgccctgctgattcgccaccggcaggacgtcgcaccgacgggcgacaaacatcgatagcgcatcgcgtagcgtcatctcttccaccagcgcgtcgccgctgagctgttcatgccgacgtacataatcgcctacgctacgtaacgaaagcagccttacgcccagctcgctgcggccaaaaaatgcctgcacgaaatcattttccggcgaggtcagcatagaaagcggcgatccctgttggataacgtggcccccgtccatcagcaccagatggtcggcgaggcgtagcgcctcgtcgatgtcgtgcgtcaccagtacgatggtgcgccccagcagctgatgaatgcgggtcatctcctgctgcaatgcgccgcgcgttaccggatcaagcgcgccgaaaggctcgtccatcagcaatacctgcggatcggcagccagcgcccgcgcaacgccgacccgctgctgttgcccgccggaaagctgatgcggatagcgatcgcgcagcgcgctttccagacccaataatgccatcagttcatcaatacgatcgttaatccgcgcacgcgaccacttttgtagttgcggtacggtggcgatattttgcgccaccgtccagtggggaaaaaggccgatagactgaatggcatagcccatgcgacggcgcagttcaagcaccggcaggctgcggatctcttccccggcaaaacggatcgttccgctatcatgctctaccagccggttaatcatcttcagagtggtcgattttcccgagccggaggtgccaattaacaccgaaaagctgccttcgctaaaatgcaaattgaggtcgctaacagcctgttgatcgccgaaggttttactgacatggttaaattcaatcatcggttgctcccttcagaaacgcgatccataaatcaaacagcgcgtcgatcactaccgccaacgcaatcaccggaatgacgcccaacaggactaaatcaatggcgctgctcaatagcccctgaaacaccagcgcgccgaaacctcccgcgccaatcagcgcggcgacgacggccattcccactgtctggaccattactacccgcaggctacgtaaaaagaccggcagcgccagcggcagttgcacatgcctgaagcgctggccgctactcattcccatggctcttgcgctctccagcacatcgcgcggcacctgattgagcccggcgaccacgccgcgcaccagcggcaataacgcatagagcaccagagctatcagcgcaggcgtcatgccggttcccgcgacgccgaatgcggcaagccacggaaactgtttcaccagcccggccaacggcgcgatcagcaggccaaacagcgcgacggaagggatagtctggatcacattcagtacggtaaacaccggcccctggcgcgaggcggaaaaataacaccagacgcccaacggtaatccgatcgccagcgccggcagcaccgtgcccgccagtaacatcaaatgttgcaccagcgcggcatcgaaaacatcctggcggttggtatactctttcagaagcgagaggttgtcgaacgtgcctgaaaacagcagcgccagcgggacaatgacaatttgcgcgtgcagcaaccagcgccacagcggcccagtggtaatacggcggatcgcatcgctacaggccagcaacatcagaccgaggcccagccacaatccacttcccagactggtacgcgccagcgggctgccctcctgcgccaactgggtcgccgccctgccgactccccacagcatgacaataaaaagcgtctgcgccatcatcagcgtcagtacgctaccgcgtttaccgggtacaaagcacagcgtaaacagcgcgcatcccgcgccagtcagcatccagatggtcgccggccagatctcccataactggcgcccctcgccgctcaccagacgattcggggcgtaattaatgaaaggcagcgcgacagcaagcaaggtcagaacaaccaacagcaacagcacacgattaaccgtgatttttttggcagcatcactcacagattacttcacccaccctttttgtcggaggtaatctgcggcgacttttttcgcatccagcccttctacggcgattctggcgttcaactgttgcagcgttttctcatcaaggctggcgaaaacgggctgcagccagtcggctatctgcggataggcctgtaacaccgattcacgcactaccggcgcgggggcatagataggctggacgccttttgggtcgctcagggtttgcagacccagcgcggcgacagggccgtcggtgccatacgccatcgcggcgttaacgccggatgtttgttgcgcggcggctttgatcgtgaccgccgtatcgccgcccgccagcgacaagagctggttctgattcaaggtaaaatcataggctttttcaaatgccggcagcgcatccgcccgttcgataaattccgcagacgccgccagtttaaaagtgccgccctctttcagataacggctgagatcggcaagcgaggagagtttatttttttccgcgatgtcctgacgtatcgcgatggtccaggtgttgttggccggcgcaggcgtcaaccagaccagcttattctgctccgcatccagttttttgactttctcaaagccttgctttgcatttttccatgccggatcgttttcatctttaaaaaagaacgccccgttaccggtgtattccggatagatatccagctctccggcggtaatcgcgccacgaacgactggcgtcgtcccgagctgaattttattgaccgttttaacgccgtggctttccagtacctgcaaaatcatgttgccaagcagtgcgccttcggtatcaatctttgacccgaccgtcacgggcgatgccgcctgtagaggtaaactcaccgtcgccagcaacgccagcgaacttacccatagctttgagatcgtcatgatgctttcctcatccttttacggcctttttcagagacttgagaaaaaagcatagttgaaaagtctgcgtttaacctgggattttccgccagtttaagtgacgtggcaggcaataaaaggggggacaggaaaagtcattgccagacagggcgctgctatcgcgccctgttgacggcaggcttacagtagctcgaacgatccttgtttaacgcgagcggaatccacgccgataaagacgttgaacttgccgggttccgcgtcatatttcatctgctgattccagaacttcaacgcctcgatatcaatcgggaaactcacggttttacgttcgccgggcttgagggtgattttttcaaagccttttaattgcttcaccgggcggctcattgacgccgtgacatcctgtaagtacatctggatgaccgtagccccttcgcgtttaccggtgttcgtgacctctacgctggccgtgactttgccgtcgcgttgcattgtcggtgaggagagcgtgacgtcagacaccgtaaatgtggtgtagctcagaccgtaaccaaacggatagagcgggccattcgcttcgtcaaaataacgtgaggtgtatttgtttggcttttcaggattatacgggcgtcccgtattgagatggctgtaatagaccggaatttgtcccaccgaacgcgggaaggagatcggcagtttgcctgacgggttgtaatcgccaaacagcacatcggcaatggcgttgccgccttccgtcccggcaaaccaggtctccagaatcgcatcggcctgttgatcttcttttaccagcgccagcggtctgccgttcattaataccagtaccagcggcttaccggtggctttcagagcggtgattaagtcgcgctgactctgcggaatggtgatattggtacggctggaggcttcatgcgccatcccctgcgactcgcctaccactgcgaccaccacatcggcctgtttcgccgcctgtacggcctcatcaatcatcgcctgcggtgagcgcggatcgattttcaccgcctcttcatacaggtttaagaaatcgacgatgcctttatcattagtgatattcgcccctttggcatagaggatcttcgccccgtcgccgacggcattttgaatacccgccagcaccgtcactgactgattcgcgaccccagcagcagaccagcttcccattacatcacgttgactgtcggccagcggcccaacaacggcaatggtgcccgattttttcagcggcagcgtttccagccggtttttcagcagtaccacactttcccgcgccacttcccgtgcctctttacgatgcaggcggctttcggcattggtgtccaccgggtcgctctctttcggccccagatggctataggggtcgttaaacaatcccatgtcatattttacgttgagcacatggcgcgtcgcgtcgtccagttccgccatcgtcactttgcccgacttaatcagacccggcagatatttgctgtaatactcatccgccatgctcatatccacccctgcctttagcgccacgcgcaccgcatcttccgggtcggccgcggtaccgtgtttaatcagttctttaatagcgccgtggtcggaaacggtaattcccttaaagccccactcatcgcgcaggacatctttcaatagccaggaatctgacgtcgcaggcgtgccgttcagcgagttcagcgccaccatcaccgcgccgctccccgcatccagccccgctttgtacggcggcatgtagtcattaaacagacgctgggaactcatatccacggtgttgtattctttaccgccttcaacggcgccataggcggcaaaatgtttcacgctggtcatcaccgaatagcggtccgccgggcttttgccctgcatcgctttcaccatggtttcgcccatgatagaggttaaatatgtatcttcgccaaagccttcggaggcgcgtccccaacgcggatcgcgggagacatccaccatcggcgcccaggtcatattcaggccgtcgtccgccgcttcatacgccgatacgcgtcctacggttcttaccgcatccagattaaaagaagaagccagaccgaggcttatcgggaagacggttcgctggccgtgtaccacgtcataggcaaaaaagagaggaattttcaggcggctcaacgccatcacctgatcctgcatttgacggatatcctggcgggtgacggtattgaaaatcgcccctacctgcccgtctttgatcatctcgcgaatcgcttctttcgggttatcagggccgacgctaatcagacgtaactgaccaattttttcatcaacagtcattttcttgagtaaatccgtgacgaacgcgtcgcgcgcttcgggcgtcagcgggtgattgccaaacaggttttccgccaatgctggctgcatcgccagactcacagcaacacctactgaacataaccatttcatgttgagtctctctttatctttatcccgacgaggcggtaaaaacagaataaaaaccgcagtttgccataagcctaaacgcgagaggagaagaaagcgaaggttattctcctaattttccgcacagtcgaatacacaaccgccagcaaatggtatcaaggcggcaaatgaataccaccaacacagaaacaatttgaatgagaaagcgtattgtcatacaaagcgctatgcttaacgctgatattttgtcccaccacaaggagtggagaatgtcttccataacaatgactgataataaaacgttcctgaatgagctggcccgcctggtaggccattctcacctgctgacagaccccgccaaaaccgcccgctatcgcaagggtttccgttccggtcagggcgacgcgctggccgttgttttcccgggttcattactggaactgtggcgtgtgctcaacgcctgcgttaacgctgacaaaattattctgatgcaggccgccaacaccggtctgacggaaggctccacgccgaacggcaacgactacgatcgcgatattgtgattatcagcacccagcggctggataagctgcacttactggataacggccaacaggttctggcctggcccggtacgacgctctatgcgctggaaaaagcgcttaaaccgctgggccgtgaaccgcactcggtgattggttcgtcgtgtatcggcgcgtcggtcatcggcggtatctgtaataactccggcggctcgctggtgcagcgcggcccggcctataccgagatgtcgctctttgcccgtattgacgaccaaggcaaactgcaactggtcaatcatctgggtatcgatcttgggcatacgccggagcagatcctgagcaagctggatgatgaacggattaaagatgaggatgtgcgtcacgatggtcgtcatgcgcacgatcacgactacgtgacgcgggtacgagatatcaacgccgatacgcccgcccgctataacgccgacccggaccgtttgtttgaatcttccggctgcgccggaaaactggcggtttttgccgttcgccttgatacctttgcagcggaaaaaaatcagcaggttttttatatcggcaccaatcagcccgcggtactgactgaaatccgtcggcatattctggcgaacttcgacaatctgccagtggcgggagaatatatgcatcgcgatatctacgatattgcggagcagtacggtaaagatacctttctgatgatcgataaactcggcaccgacaagatgccattctttttcacgctaaaaggccgaaccgatgcgatgctggaaaaagtaaaatttttccgtccgcatttcaccgaccgcgcgatgcagaaattcggccatctgtttcccagccatctgccgccgcgaatgaaaaactggcgcgataaatatgagcatcatctgctgttaaaaatggcgggagacggcgtcgcagaagcgcaacgctggctgaatgaattttttaaatccgctgagggcggtttcttcacctgtacgccggaagaaggcagcaaagccttcctgcaccgcttcgccgctgctggcgcagcgattcgttatcaggccgtacacgctgatgaagtggaagatatcctggcgctggatatcgccctgcgccgcaacgataccgactggttcgagcatctgccgccggaaatcgacagccaactggtacataaactctattacggtcactttatgtgccacgtttttcatcaggactatatcgtgaagaaaggcgtcgacgtccatgcgctgaaagcgcaaatgctcgagttgttgcaggcgcgcggggcacaatacccggcggagcacaacgttggacatctgtataaagcgccggaaacgctgacgcgtttttatcggcaaaatgacccgaccaacagtatgaaccccggtatcggcaaaacgagtaagcggaaattctggcaggaaaatacgcccgacgaaacgcattaacaccgtgcggtttaccgtgaagcccggcggcgcgatgcctgccgggcctgcggcgacttaatcgttctgtgcggtttgcgctccggcactggcgctggctgccgccatttgcgcggctttttgctttttatagctcagcgcggcagccggaacgggcatgactttaccggtttcaatccatgtacgcaggcggctggcgtccgcaaagtgggtatatttgccgaacgcgtccatgaccaccagcgcgaccggtttgttattgatcacggtacgcatcaccaggcaatgccccgccgcattggtaaatccggttttcgttaactggatattccagttatcacggtagaccaaatggttggtattgcgaaacggcagcgtatacgccggatgcgagaatgtcgccatgtcttcgcgcgtggtgcttagctggccaatcagcgggtattgcttcgtggcaatcagcaattttgttaaatcccgcgcggtcgagacgttatgaatcgacagccccgtaggctcaacgaagcgggtatgcgtcatgcccagcgctttcgccttcgcattcatcgctttaataaatgcgttataaccgccaggataatagtgcgccaggcttgccgccgcacggttttcggatgacatcaacgccagcagcaacatatttttgcggctaatttcgctgttcaggcgcacgcgggagtaaacccctttcatttccggcgtctggctgatatcgaccttcagtatttcatccagcggcaatcgcgcgtcgagcacgaccatcgctgtcattaatttggttatcgaggcaatcggacgcaccagatccgggtggttcgaatagatcactttattggtgttgagatcaacaatcattgcgctaccggaggcaatctcaggttgagacgccgcggttgtcgctgccgttttcgccacagcctgcggggcaaaaggtacggccaacatcagagcaaggctcaggaatgaagctcggaatttcagcatgatgagatttctgataatgattcacgcgcgtcgtaacgcacaccgcctgagctaagattatactcaagctagcagtggcatcatagcggcacgccagcgttgccgctacagaagaatcgtcagcaaatgctgcattgctggcttttgcgccagccctttttctcatcagaacaggcggtagccgtatccccacaggatcacggtgatcgccagtagcacctccaggaccagcacgccgatagcgagcgtcgaactggagaagcttaatccttcctctctattaatgttaaggaaagtcggaatacccaaatacagcaaatagccggtgtaaaaaagcgcgacagcgccgaccagtgcgcatagccataccaggggatagagcgccaccagaccacttaaaaacagcggcgtcgcgacatagccggcaaaaaccatacagcgcgcaagcgatggccgttgcggatagtttcgcgccatccaccagatgacgcgtcccatcaccgcgacgcccgccagcatcacgccgtagaacaagaccgccagcgcaaaagcggtaaacagcgagagttgtaacacgttgccgtcgccaaaattccagccgatttgcgtcgtgccgataaaggcgcagacgacgggaatcgccgccatcagcaaaacatggtgcgtatagtgatgcgaaacagtttcgttttcgcttttgatcacctgcatttcccgatcgggatgggaaaaaagcccccatacatggttcatactgcccccttctgctgcctcagatgccagtatgttcaagtataattcagtttctggttattttatgaacaatggcaaaatagtctccggcaaaacgtcggctttgccgcgcacgcctcttgccagggtgtatgcttaatgccggaggtggtttacgcatggatatcaacacgcttattacgcattatggctatgcggcgctggttatcggcagtatggccgaaggtgaaaccgttaccctgttggggggcgtcgcggcgcatcagggattgctcaagtttccgctggtggcggcggctgtcgcgctgggagggatgatgggcgatcagctactttatctgttaggacgatgctatggcgggaagatcctgcgtcgtttcccccgttatcatacgaagattcgtcgcgcgcagaaaatgatccaacgccatccgtatctgtttgtgatcggcacgcgttttatgtacggcttccgggtggttggcccgctgctgattggcgccagccgcctgccgcctaaaatttttctgccgctgaatattgtaggcgcgctgatctgggcgctgctgtttaccacgctgggatatcttggcggcgaggtgatcgcgccatggctgcacgacctcgatcagcatctcaggcacggggtctggctgattctggccatcgtcctggtggtgggcgtgcgctggtggctgaaaagacgcggcaaagcggaggcccgttaaacccgatggtatccggatggcataacgccgccatccggcacccggcgtttattttgcgttgaattgcggattcgccagcataaacccgccgtcgacaatcagcgactgaccggtggtgtagcttgctccttccgaacacagccaggcgacgaggctggctatttcatgcgtagaacctggtcgggcgatagggattgagggttccgatcccggctcaatgtcgctgtcatccatatcattcatcggcgtggcgatagcgcctggcgcgacggcgttgaccaaaatatgatgctcaatcagttccagcgccatggatttagtcaatcccccaacgcatgtttcgccgcggtataggcgctggcttgcggaagcggcgtatgctcatggacggaggtgatgttgataatgcgccctccctctccttgtttaatcatatgccgggcggcgatctgcgcgcagagaaacgcgccatcgacgtccacggtaaaaatttgccgccactgcgtaaacggcatatcaataaacgcggatttggtcatcgccccggcattattgaccagcacgtcaacgcgccccaggcgctgaataagatgttcaatggcctgcgcgccctcgggtaactggctcaggtcaagatgaatggtctctgcccgcacaccaaactgcgccgctttttttgccgtctcctgcgcgccgcgttcatcggaatgccaggtgataccaatatcaaaaccgttttgtgctaataacaacgcacacgctttgccaattcccgaatctgatgccgttacaattgcgactttggtcatattcctctccggatgaatcatacacagcctaagtataggaaccctgtctgaatcatccggaaaaatcaggaatgataaccgccgcccagcgcgctggtaagctgaatagaggcatccagccactggccctgcaacagcaagccgttacactgctcgcgcagtgccgggattttggcctcgctcacgcgggaacccgcaataataccggcattaaagcgcgcttgcgccagaccgaccacacgctgcgcgtcatgctcaatctgctgctgatgctgatttttctgcgccagcgtctctacctgactggcggcgcgcgccacatcattaaccgcatctaccaccgctttgttgtagttggcgatagaaaggttgctttgcgctttggcgatatcgaggttggcattcagcctgccgctgtcgaaaatcggcagcgtcagcccgccggtaatgccatattgctgtgcggaatggcggaacagatcgctcagatgtaacgcatcctgctgtaaaaaagccatcagattgatatcgggataaaacgcggccttcgcggcgtcaatgctgctcaacgaggattcaatgtaccagtgcgcggcctgtagatccgcccggcgcgccagcaacgaatagcccagttgcgacggtaactggctttcaacggcggggagactcacctgacgcagcttgagcgccgccgattgcgtattggttaacgcgctgagccgcgcttcaataaccttcattttaccgttaacgtcattcaactgctgctgggttttgctggcgtcgatatcggtctcgaccccttcaacagaagaagtaataccgtgttgatacagctcccggtttaccgccaccacgttttgctgctcatgctcgatttgcatcagcacatttttcagcgctgcctgtgtttgccactcccagtagagtcgcgccacgccgcttgccagcaattgtcgggtctgctcctgctccgcttcgcgcgctttgaccgccccgatccgcgcagtaacttcagcgcggtttttcccccataaatccagatcccagcccgccgtcaggccgaatgtaccgttggtataccacggcccggtcgttcccgccgcagggtcggtaatcgcgaatggccccatcagcccttccgcggacattcgctggcgctcaatgtcggcagaaaagtcgagctgcgggccgtcctgcgcctcaaccgctttcgcctgcgcttccgccagttgaatacgctgttcagccacctgcatatccggcgaatgctgtatggcattatcgatcagcgcgtcaagctgcgcatcgtgatacgccttccaccactggctatccggccaaccgtttttcaatgccgccggcaggctggaatcaacatgagaagagggcgtctgctgggtcagcgactggcgggtatcgtgcatgggggcgcaacccgccagcaaaataaaaagcggtaagctcgctgtcgcggcaaggaaagaattacgattcatggaggtgttctgataaaaaaaggtgcgcagagagtacgtcttacggcgatctattttttagttacgcgtggcaatacatcatcagacaacaaaagacatattttgaaatttatatgattagtaaataatttcatctgatacattttttgatgtaatacttcaatgaaaagtcccactaacccgttcataaatgaacgattttgctgcaatacgcgccagcagccttcatgagttaaacgtcgccgcgcccaacaaagcagcagatggcttaatactttcctatactttgtttgtatttaccaataaagggacaaacaatgaaaattcttctatgggcaatcttaattatttttctgattgggctgttggtggtaacgggcgtgtttaagatgattttctgattcctgcgccgggcagcgatagtatctgcccggcacacgttctggacgctgtagagattagattttaatagcctgaatcgcccgcgcaatctcggacgaacggtttaacgcccgaatcgactgaaagagttccgtcgcctcaatatattccttacgtaaatatcccagccactgtttaatacgcgcgacatgatataaaccggtatcgccctgcttttccagtcgggtatatttttgtaataacgtcaccacttccggccacggcatacgcggctcgttatacttcaccacccggctcaggttaggaatatttaacgccccacggccaatcatcaccgcatcgcagccgctggtcgccatacatgcctgcgcgctctgccagtccaagatttcgccattcgcgataaccggaatagtcagacgctggcgtatttcgccgatcgcctgccagtcgatatgctcggcgcggtagccctgcgctttggtacgaccatgcaccaccagttcactggcgccagcctgctgcaccgcatcggcgatttcaaattttctatcgccgctatcccagccgagacgcacttttaccgtcaccggaagatgcgacggtaccgcggcccgcatcgctttcgcgccctgatagatgagttcgggatctttgagcaatgtcgcgccgccgccgctgccgttcaccacttttgacggacagccgcagttcaggtccacgccatacgatcccaacgccgtcgcccgcgcggcgttttccgccagccactgcggatgctggcccagaagctgaatacgcaccggcgtgccggacggcgtgcggctggcgtgatgcaactccgggcagatgcgatgaaacacttttaccggcagcagctgatccaccacgcgcacaaattcggtgatgcagagatcgtaatcattcacttcggtcagcagctcgcgcactaacgcgtcgagcacgccttccatcggcgccagtaaaacacgcatatcggtatccacagcaaaaaaagaggcgctatcataacgcctctctgcgatgagcaaaactttttgccgggtggcggcgcaaacgccacgctacgtcacgtaaagtgctcaacgcggctcaagacagttatcttctttccagccgtacagccattcgataccgcgataaaacgcctcctgcgatttccctttccacaacagattacgcacctgacgctccaccccggcggcgtgatagagacgccccatctcgcgggtagaccagacgatacgcgccgtgcggggaatacgcaccgactcatacagcgcaaatgcctgctgcgcgtcgccgtcgcagcgttccagcgctttgcctagcgtgacggcgtcttccagcgccatacaggcgccctgggccatatattgcgccaccggatgcgcggcgtcgcccaccagagtgatacgctcggttccccattttgcgaccggctcgcgatcggcggtcgaccagcggcgccaggaggtcggcttatccagcatctggcgcgggcggggatgaatgccggcaaaataagagagcacctcttctttactgccgtctttcacgccccactcttcttgctggcggctgtggaatgtcaccaccagattgtactgttgacctccgcgtagcggataatggaccaggtgacaatgcgggcctgcccacagcaccggtgcgttaatacgtaaatcgtccggcatatcgtcgcaatcaatcaccgcccgatagactacatgccccgttacgcgcggcgcgtcgccgagtaaactttgccgcacgaccgatttaacgccgtcgcagcccacgagaatatccgccgtccagctatttccctgctcatcaaacaccgtaacgtcatccggcgtctggcggatatcgacaatatgggtcgaggtacgatactccacgccagggtgcgtcagcaccgcttcccataccgttgcatgaatatctacccggtgaattaccgcatacggcccgccaaaatggtcgcggaacgcctgtccggtttcaatgcataccacttcttcggcattcacggcatccatcatggtaatgtgatcggtaaacaccgcacgctggcgggcaacatcgcccacaccgagactatccagcgccgaaaaagcgttcggcccaagctgaatacccgcgccaatctcgccaatttcgtgcgctttttccaacagcatgacttttattccctggcgcgccagcgacagcgcggtcgccgcgccgccgattccgccacctacaataattgcgcttgtcacgtgagtcatggtcattctccttttcaggccgggattttatcttgttgattttccggcgcggcggcaataaacgccggtagctgtacgcaggcgtcataaacggctttacagcgcggatagcctgataaatcgcagcccatcctgagcgcattcgcccactgaggaatcaggcagcagtccgcaaggcctggcgcgtcgcccacgcagaatcgtccggactgacttttacgcaatagctgctctaccgcgcttaacccttgctgtatccagtgggcgtaccagcgttttttatcctcttcgctaaccttcagctcatcggtcaggtagcgcaacacgcgcatgttattgattgggtgtatatcgcaggcgatagcgtagacaatttccagcgcctggctgcgcgccgggtcgctcgtcggcagcagcggcgtttgcggaaaatgtcggtccagccagtcgacgatggccagcgattgccccaacgattcgccgtcatcagtgaccagcgtcggcaccaggcctaccggattcatccgtcggtaggccagcgcattctgctggccgatacgaatattgacgcccaccgtctggtaatcaatcccctttaacgccagcgcaatacgtacacgataagacgccgaactattaaagaaactgtacagcttcatcgttcacctcagacaattttcacagcaatcggcgtcagaccttctacgttcccggtgatgacatcccctttcaccactgcgcccaccccctctggcgtaccggtgaaaattaaatcgcctggctgcaattcaaagaagccggacaaatagctgatggtttcattcaccgaccaaatcaggtgacgaatatcgctgcgttgatggtcttcgccgttaacctgtagccaaataggggcgttatccacattatgcgtttcagcggctttgtgtaatggcgcaatgggcgcggagagatcgaacgctttgccgatttcccacgggcgtcccatctgacgcatttccatctgacgatcgcgacgcgtcatgtccagaccggtggcgtatccccagacatattcatgggctttttccagcggaatatcgctcccctttttaccaatcgccaccaccagctcaatttcataatggtagttatcggtctgcgccggatacggcagttccagggtatcccccgccgctaccgggaccacagcgtccgctggtttacaaaagaagaacggcggttcgcgatcgggatcaaagcccatttcacgggcatgggcggcatagttgcgacccacgcagtaaacgcgacgtaccggaaactgctcatcactgcccgccacgggtactgttaccggggcctgcggctggaatacatatttggtcatgttctctctccctaattaataacgtgcttcgcggaacagccccagggcttcctgaaccggcttgtccgaaaaactgaataacaccgtgtcttcgctgctgcgaaacgacacctcatgccaggtcggcgccacaaaaatgtcttttgcggaaaaatgaaaagtttcgttgccgatagtgacctgccctgccccttcaacgacgtggtagatagtgctgtcggtgctccgcgccacacgcgaggcaaagccttttggcagcagttgcaggaacgcgcccatcgacggcatcggataaccgccggtgacgggattaacgtaacgcagcttgtagccttcccactcatccggatcgcccatacgggtcagatcgtgcaacgcctcgcgactgcggtcgtaacggtagttgaaaatcggcgacgagttcccgcgctggtggcgcagcggcagcatattcgctgcatagcgcggcagataatcgccctcttttcgcgtcaccggctgctgatcttcgggatagtcttccgcaaaaccacagcccaggagattgactaacggcagatccagaccatccagccataccaccggctctgatcccggattaccatgatcgtgccagcgccactgcggcgtcaggataaaatcgccggtatgcattggcgtgcgctcgccgtccaccgcggtaaatgcgcctttaccttcgacgataaaacgcagcgccgactggttatggcgatgactcggcgcgacttcgccgggcaggatcagctgtaaaccagcgtataaggtcgccgtgatcgacgactgaccgcgcaatgccggattttccagcaccagcacccggcggatcgcctctttcgcgccaatgacattgccgctttccatcagtagcggacgaatttcctgataattccagtaggccggcgcgcagttggcgtttggcgtctgcggtaccaggtgatgtaacgattcccacagcggcgtcagattctgcccggaaatatgctggtaatactgctgacggctatcttttacgttctgatttatttcagacatggagattctccttattcgtttacgacgctggcacgcggcaggtcgtcaggtacagaaatcgaaaggcggacaaccactgtcagcagggtaagcattaccgcgctgatagccgccggaatagcaatgacaaaaaacaacgtatcgaaagagaaattgagggccatcatcatgccgccggagagcgaaccgacaatcgccccgcagcgtccaatggcgttcgaccagctcacgcccgtcgcccgactttgggtggggtacagcgtcgccgtcagagcattcagcccgacctgggaaccgctaataccgatgccggtaccaaaaatcgccagcgccatcagccaaaggccgttttcgctcaggcctatcatgacaatgcaaactgcgcccagcgcatagctcaccgccagtacccggaacgggttaagccggtccatcaacacgccgagtaacagcgcgccaagcgtgccgccaacctggaatgcggcagtcacccacgacgcctgttgcagatcaatacctcgatggttaagtaacgtcggcatccagctggaaagcagatagataatgagcaggctcataaagaacaccacccataacatcagggtaatgacaagctgtcgcccggcaaaaagctggcgaatactgcctttggcgacggctgccgtctcatgcagaaagaattgcgtatcgtgatagcgctcgccggtaatggcgctgaccgtccgggcgacaacggcttgcggtagttggcgacgtacctgccagcggggagattccggcagcgcgaacagcaggccgaaaaacagcatcaaaggcaagatgccgcctagcgccagaattccgtgccagccaatcagcggcaccagttgcgcgctcacaatcccgcccatcgccgaccccagggtaaaaccgcagaacatcagcgtgaccagcgctccgcgtcgacgagcgggaaggtattccgacgtcatggtgatggtattcggcatcgctccgcccagtcccagaccggttaagaagcgcagcaacaccagggtttctatatccggcgagaaagcggaaagcaggctcaatgcgccgaatagcgccacgcaaagctcaatgacccgcttgcggccaaagcgatccgccagcggcccgcatagcagcgcgccggccgtaagccccagcagccctgcgccaaacagcggcgcaagttcgctggcgcttagctgccagtgggtacgaatatccggggcgatgaagccaatcgcggcggtgtcgaaaccgtcgagcataaccaccagaaaacagcagatgataacgcgccactgcattttgccgacgggcgcggcatcaataagggcttgtagatcacgtcgttgagtcatagctaatgcctcagtgcagggagatagatgttgtttttatgtttgctatgttacgagtttgtagagtgagcgataaaatgtacaatggcttttcaggcagagacataacctggaggttatagcgaatggcgaactgggcgcagaaattgaaattacatcacctgcaaacgctggttgcgctgggcgaacagggcaacctgacgcacgtcgcccggatgatgaatatctcccagccggcgctatcgaagtggctatctcaactcgaagatgagataggcatcacgctttttgagcgccacagtaaaggactacgcccctcggaaggcggtaaattactgctccagcacgcccagcgcctaattaacgatctggagcgttcacagtatgaaatcgcccgtttcaagcagggcggcctggttggcagcctgaagatcggctgttcgcccgtggcgactgactgcgtatcacaggcgattctgagcctgcttaacgaaatgccgacgctgcatctgaatattgaagagaaggtaatgacgccgctgctgcacgatttgcttgccggtcaggtggatgtggtggtagggcgtgtcggcggccgcgccctgcaactgccgcttaattatcaggtactttataccgagccggtctgctttgtggcgcgtccgcaccatccgctggccgcgcgagcgcagatcgcctggagcgatctggcgcactggcggtggatagtctggccaaccggcacccctattcgcatcagtattgataacgccctcgtcgataatggcgtcatgctcccggaaaacaccattgaatcggcgtcaatgaacgtcagcaccaatttgctgcaaagcagcgatatgatctctattctttctttacggctggcgcaacgctatgccagccaggggcaactggcgattttaaacttgccaaaaattgagcaaaaaggcagcgtagggatgttctggcgtaagaatgagacgccgtctttggccctgagtcgctttttgtattttttagcccaggtttagcgccgccgaccaggggcattgcccgatgttcctgctgtctatacccactatgctaagaattcatgatgtgatcggtagcacgttttaacgtttaattgtatgatgaatccatctcatcaagggctttaaacatgagtaagtcactgaatattatctggcaatatatacgcgcttttgtattgatttatgcctgtttgtacgcaggcatttttcttgcatcactgcttcctatcactattcccggcagcattatcgggatgttaattctgtttgtattgctggcgctgcaaattctgccggcaaagtgggttaaccccggctgttatgtgctgattcgttatatggcgttgctgtttgtgccaattggcgttggggtcatgcaatattttgacttactgcgcgcgcaattcggcccggtggtggtctcttgcgctatcagtacgctggtcgtttttgtggtcgtaagctggagttcacatctgatacacggtgagcgtaaagtggttgggcagaagggaacgaaaaaatgatgacatatatctggtggtcgttaccgctgacgctggcggtatttttcgccgcccgccgactggcggcgcattttaaaatgccgttgctgaatccgctgctggtggcaatggtagtcattattccttttctgttgctgaccggtattccctacgagcactacttcaaaggcagcgaagtacttaacgatctgctgcaaccggcggtagtggcactggcctatcccctttatgaacaattgcaccagattcgcgcgcgttggaaatccattattagcatctgttttgtcggcagtctggtagcgatgattaccgggacatccgttgccttgctgatgggcgcaacgcctgaaatcgcggcatcggtactgcctaaatccgtgactacgcctatcgcgatggcggtgggcggcagcatcggcggcatccccgcgatcagcgcggtatgcgtaatttttgtcggtattctgggcgcggtgtttggccacacgctgttaaacgcgatgcacatccgtactaaggccgcacgcgggctggcaatggggaccgcctcacatgcgctcggtactgcgcgctgtgccgagctggattaccaggaaggcgcgtttagctccctggcgctggtgatctgcggcattattacctcgctggtagcgccctttttgtttccgctcattctggcggtaatgcgctaacgacgggacaaaagaccgggttaaaatttgcgatacgtcgcgcatttttcattgaagtttcacaagttgcataagcaatgagatttagatcacatattaagacatagcaggcccgtaaactacggttccattacattgttatgaggcaacgccatgcatccacgttttcaaactgcttttgcccagcttgcggataatttgcaatcagcgctggcccctatcctggcggaccaccattttcccgccatgctgaccgcagagcaggtctcgacgcttaaaaatacggcgggactggacgaagacgcgctggctttcgcactgttacctctggcggcggcctgcgcccgtaccgatttgtcccattttaacgtcggcgcgattgcgcgcggcgttagcggcaactggtatttcggcgcgaatatggagttcctgggcgccaccatgcaacaaactgtgcatgctgaacaaagcgcgattagccacgcctggctacgcggcgaaaaagggctcgccgccgtcaccgttaactacacgccttgcggccactgtcgccagtttatgaacgagctgaacagcggtctggatctgcgcattcatctgccgggccgcgcgccgcatacgttacgcgattatctgcctgacgctttcgggccaaaagatctggagatcaaaacgctgctgatggacgagcaggatcatggctttacgttaacgggcgatacgctaacgcaagcggcgattacggcagccaataagagccatatgccttatagccactcaccgagcggcgtggcgctggaatgtaaagatggccgtattttcaccggcagctatgcggaaaacgccgcctttaaccctacgcttcccccgctgcaaggcgcgctaaacctgctgagtctcaatggctatgactatgcggatattcagcgcgcgattctggcggaaaaaggcgatgcagcattaattcaatgggatgccaccgccgcaacgctgaaagcgttaggttgccataatattgaccgcgtgcttctcggctaagcaaatgtgccggatagcgacgcactggcgtcttatccggcctgactctcctcttccgcgacccgatacaagggaaatcatgctgaaaatctccgcaatcagacggcggtttcttgcgctacgtcttcgggtacagtagcctgatcgtactttcatcctggtatcgagtttcctgcatgttaaagcgcgtgttttacagcctgttggtcctggtaggcttgctgctgttgacggtgcttggcctcgatcggtggatgagctggaaaacagcgccctatatctatgacgagctacaggatctcccctaccgccaggttggcgtcgtgttagggacagccaaatactatcgcaagggtgtcattaatcagtactatcgttatcgtatccagggcgcgttaaacgcttacaatagcggtaaagtcaattacctgctgctcagcggcgacaatgccctgcaaagctataacgaaccgatgaccatgcgcaaagaccttatcgcggcgggcgtcgatcctgcggacattgtgcttgattacgctggcttccgtacgcttgactccattgtgcgtacccgcaaagtgtttgataccaacgactttattatcatcactcagcgcttccactgcgaacgcgccttgtttattgcgttgcatatgggcattcaggcgcagtgttacgcggtaccttcacccaaaaatatgctgacagtgcgcctgcgcgaatttggcgcccgctttagtgcgctggcggatctctatatttttaaacgcgaaccgcgttttttaggcccgctggtacctattcccacgcagcatcaggtgccgaatgacgcccaggggtatccggccgttacgccggaacaattgcttgaactggaaaagaaaaaagggaaatgatcatggatgtacagacgatatttgtcatattagcctttctgctactcccgcttttttgcttccgtgaggcctggaaaggctggcgaaccggcgcggtagataaagttgtcaaaaatgcgcgaaaaccggtttatgtctatcgccatgccgatcccgtacaatattggtcttatctttttctttataccggttgcggttttttatttactggaatgattatttatcttcttttttatcgttaatctatttattatccctttaaaattgagaatagttattattatgatataaggaacaaatgctgttttgcattctggtttcatttttttgtgaattctttcacagaatacccttctttcaatgcttaggctggcggtagattttagatcattaaaacgcgttatttgcgtttcgccttaatttattcaagcattaaggaagattatatgccgcaacaaaattatctggatgaactcacgcctggttttacgccattactggcaataaaagaggcttcacgttgtttattatgtcacgatgcgccctgtagtcaggcttgcccggcgcaaaccgatccggggaaatttattcgttctatttactttcgcaattttaaaggcgcagcggaaactatccgggaaaataatgcgcttggcgccgtctgcgccagagtctgtccgacggaaaaattatgccagcgcggatgtacacgttccgggatagataaacctattgatattgcacgcctgcaacgttttattaccgattttgaacagcagactgccatgcagatttatcagcccgggagtaaaacacgcgggaaagtcgcgattattggcgcgggtccggcaggtttgcaggcaagcgtgacgctcacgcatttaggctatgacgtcaccatttacgaaaaacagccgcagcccggcggatggctgcgtcacggcatcccggcatttcgtctgccgcaaagcgtactcgatcaggaaattgcccgcattgtagaaatgggcgtcaatattaaatgtaattgtgaggtgggcgggtcgctatcgcttgcgcaactcaaagccgaatatcgcgccgtgctgatgaccgtcgggatgtcctgtggctctggtttaccgttatttgagcaagccagtcacgtagagattgccgttgattttttacagcgcgcccgtcaggccgacggcgatattagcgttccgcgtagcgcattaattattggcggcggcgacgtagcgatggatgtcgccagtacgttaaaaattctcggctgcccttccgtcacctgcgtggcgcgggaagaattagccgaattccccgccagcgaaaaagaatttaccagcacgcaggcattaggcgtatcgattattgatggctttacgcctgtcgccgtcagcggaaataaagtgaccttccaccatgtacgccactcaggagaactgacgctggaagcggaaaatattattttggccgtggggcagcacgcgcgactggatacctttgcggagataaaagcgcagcataatattatcgacacgcataattatcaaaccgacgacccggcgatctttgccgctggcgatattgttaaaggtgataagaccgtcgtttatgcggtaaaaaccggaaaagaagccgctcaggctattcatcattatttagaggaggcctgctcatgttaacaaaagatttgtctgttaccttttgcggcgttaagtttcccaatccgttttgtctttcttcttctccggtaggcaattgttatgagatgtgcgccaaagcctatgataccggctggggcgggatcgtttttaaaaccattggtttttttattgccaacgaagtctctccacgttttgatcacctgacgaaagaagataccggttttattggcttcaaaaacatggagcaaattgctgagcatccgctggaagagaatctggccgccattcgacggctaaaacaggattatccggataaggtgctgattgcttccatcatgggagaaaatgaacagcagtggcaggaactggcgcgtctggttgaagaagccggcgcggatatgattgagtgtaacttctcttgcccgcagatgacctcgcacgccatgggaagcgatgtagggcaaagcccggaactggttgaaaaatactgccgcgccgtaaaacgcggttcatctttgccaatgctggcgaaaatgacgccgaatattggcgatatgtgcgaagtcgcgctggccgccaaacgcggcggagccgacggtatcgccaccatcaacaccgtgaaatccattactaacatcgacctgaaccgcaaaatcgggatgccggtggttaacggtaaatccagtatctccggttattcaggaaaagcggtgaaacccattgcgctgcgttttatccagcagttgcgaatgcaccctgaactgcgcgatttcccgattagcggtatcggcggcattgaaacctgggaagacgctgccgaatttctgctgctgggcgcggcgaccctacaggtgacgacaggcattatgcaatacggttatcgcattgtagaagatatggcgagcggcctcagccactatctggccgatcagggatttgcctcattacaggagatgatcgggctggcgaatggcaatattatcccggcggaagacctggatcgcagctatatcgtctatccgcggattaatcaggagaaatgcgtcggctgcggacgttgctatatctcctgctatgacggcggtcatcaggcgatggagtgggatgaacacagccgcacgccgcattgcaatacggaaaaatgcgtcggttgtctgctgtgcggtcatgtctgcccggtcgcctgtattgatttaggcgaggtcaaatttaaaaaaggcgaaaaagagcacgcgttaacactgtagctctcggtatgaagcccggcgcgcagtttcgctgcgccgggttatctgataagcaaggcaataggtctggataactacttcttacgcgcgtatttcagcgagtccagcgccacggcgaaaatgataatgccgcctttgataatgtactgccagtacgggtttaccccgatataggtcaggccgtagttgatgacggtaaagataatgacgccggtcaccacgccgaagaccgtacccactccgccgctaaacgatacgcccccgaccacgcacgcggcaatcgcatccagttcatacataaagccgaggttgttggtggcagaaccaatacgccctgcttccagtaagccgccgaaggcataaaacacgccggagagcgcataaatcatcagcaggttcagcgccacgtttacgccagaaactttcgccgcttccgggttgccgccaatagcaaaaatgtttttaccaaaacgggtcttattccacagcacccagacaaacgctaccgcaatcagagcgtaaaaggtgatgtatgagagccggaaactgcccatcgccacaaagccctgtgcaaaggtggaaaagccgctgtcaaagccggaaatgggcgaagcgccgacaaagtcatagtaaagggagttgatcccataaacgataatcatcgtgccaagcgtggtaataaacggcgtcacgttcaggtaagcaatgatgatgccgttcaccaagccaatcaccgcgccaatcgcgcagacaatcaggatgaccagcgcaatcggcatggtcgccatttccggaaacactttattggcgttttccattgattgcagtaatgttgccgccacgaccgccgccagccctacctgacgccccgccgacagatctgtcccctgggtgacgatgagtcccgccacgcccagcgcgataataatacgtaccgaagattgcgtcagaatattacttaaattcagcaaacttaaaaaagtcgggtcctggaaaataataatcgccagcaacactaaaagaacgacgtaaattccgccctctttcagccaggtcaaaaagcttttcttgtttaacgcactcataaggagcccctgatcttaaaggtgcaaagaagcaagacgcaaaatttcgttttgcgttgttgttttagtatcgacaatgccggaaacgagaccgttactcatcaccaggatacgatcggtaatccctaacagctccggcatttcagaagagataatgatgatccccttgccttttttcgccagttccgcaataagctgataaatttcaaattttgcgccgacatcaatgccgcgggtcggttcgtccagcattaatatttccggctgcgttaatagccagcgaccaatgatcaccttttgctgattgccgccggaaagcgaaccaatttgcgtgcgatgccccggcgtttttacccgcatggaatcaatgacccattgggtgtcgcttttcatccgggaattatccagtaaccccactttatttttataattacggatattcgaaattaatgagttaaatccgatatccagataggcgtaaattccggtggaacgacgctcttccgtcaccagcgcaaaaccgtggttaatcgcttcgttcgcagtgtgattattaattttcttgccatgtaaagtgattgtcccggacgacttctcacgaatgccaaacagcgtttcgacgatatcggtacgctttgccccaaccagaccggcaatgcccagaatttcgcccttgtgcaaatcaaaggagacatcgcgaatggaaggctgacgcagcgaggtcaggtgacggacctccagaatcacgtcgcccggcttattttctttatccgggaaacgctggttcagggaacgcccgaccatcatcgcaatgatcttatccatatccagcccttccagcggctgggtggcaatccactgaccgtcgcgcaaaatagtaatttcatcgcacaattgaaaaatttcttccattttatgcgagatataaacaataccgcagccgcgttctttcagcttgcgaataatcgtgaacagatgattaacctctttctcagttaacgatgaggtcggttcatccataataacgatcttagcgttataggaaaacgccttcgcaatttcgatcatctgcatttgcgaaacggataacgttcctacgcgcgcgcgtgggtcaatatcgatatccagttcatcaaatatcgctttggtatcctggtacattttatcctggtcgacaaacatacctttggtgggataacgtcccagccacatgttatccatgaccgaacgttgtaataccaggtttaactcctggtgtaccatcgaaatcccattctccagcgcttctttcgccgaatggaagtccacttcttttccctgaaatacaatgctgccggaatctttttggtaaataccgaaaagacattttaataatgttgatttgcctgcgccgttttcgcccattaatgcatgaatagagtgcggacgaacgtttaagttgacattatcaagcgctttcacgccgggaaatgatttgttaatgccacgcatttccaacaaatattcacccgacggcggagaaatcgtgctgcccataatgataccctgtcggcctttttaattatgactatccgcgccggatggcaaaagaaatacgttatccggtctgcggcgcgtcacccttccacggtttcagggcgcaacaaaattgcgcccacagacggaaaagttatttttgggtaaattcgctcagattgtctttgtccacgccgacataaggcacgcgcacgattttattctcaatcttccagctggtgccgtcagccgcgcccttgccttcggcgaggtttttcgccagatcgaatgtcgctttcgcctgattgttggcgtcattcagtaccgtaccggccatcgcgcccgatttcaccagcgccagggcttccggtaacgcatcgacgccaaagaccggaatcgacgatttattatgcgctttcagcgcctctaccgcgcccatcgccatcgcatcgttattcgcgataaccacttcaatcttgttagcgttcgggccagacagccaggcatccatcttatcttttgcctgcgcggtatcccacatagcggtgtctaacgccagttgctcggtctgaatacctttatcatttaactctttcaccacatacgtcgtacgggcttcagcatccgggtgccccggctcgcctttcagcagaacatactgaattttaccgtctttattcagatcccaaccctgattcgcctgccagtgtttggcaatcaagtcgccctgaatcacaccggattctttagagtcagtcccgacataatacgccttgtcatagctgtccagcgctttgcgggaaggctctttgttaaagaacaccaccggcacattttgcccgcgcgctttctcaatcaccgtaccggcggctgccgggtcgaccaggttaatcgccagagctttaacccctttcgccaataaaacgtcaatttgatcattctgtttggactgatcgttttgcgagtcattcatcagtagctgaacatccggcgcggatttgccatctttttcaatagccttacgcaccacggacataaagttatcgtcatatttataaatcgtcacgccaatacgagtatcagccgcgtgcgcgtgcgcgccgaataacagacttgccatcacggcagaaagggtcagtaccttcttattcatggtagctccggttttattatgtagggtatagcgtaaaaaaatgcccggctgttcagcacgttaacgcgtgttactgaacgccgaagcgtatttagagcctatcccaccaggcgttattggcgcagccagtttggacacggacagcgcgcaaaaaccggagcgtacacgtagtacgtgaggtttgactcgctacgctcgcccttcgggccgccgctagcggcgttcaaaacgctaacgcgttttggcgagcactgcccaggtccaaaatggcaagtaaaatagccctaatgggataagctcttattcaactctttatttttgtccggtagtcgcgggatattgtgataacggtttttataagcgaaataccccagcaaaactgacaactaactgttacacgttagttacagtgcgacaaacgttgtcatcatagctatcacaatgttaataaactgtgaatttactcacagattgaaaacggttacatgcggtgcgtaatcagttagtgatcagtaccgcattctgtcgccatgccaccgaatggcgccgtaccagggtcggcataaagcagtgcgtcgccgtgatatccagcgtgcctgcggccccctgtaacgccagctcggtcgcgattttcgccatagaagcaataggatagcgcacggtagtcaactgaggatcggtataacgagcaatagggatatcatcgaaaccgatgacagacagatgcaagggaatggcgatgccgttatcttttaacgccgtcagcgcgcccgccgccatgttatcgttataggcaaataccgccgtcagttgcagattgcgtcccagcaactcaaccattgccgactcgccgccctgcatgtccggcgtgccggtgcctatccagctctccgacgcagcaatcccctgctcttgcagcgcgtgtaaccacccttctctgcgcatcgcgtcatcttcaatacggtggctggaggccaggtagccgatgcgttgatgtccattattcagcaacattcgggtcgccattctggcgccgctcacattgtcgagacaaacacaacgatgcgcataacccggcacgatacggttaatcagcaccataccggggatctgatccataaagtcgctcagctcgcgatcggttaaggcttttgagtgaacaatcaatgcgttacaacgctgacggatcaagacttcaatcgcatggcgctctttttccgcctcatgataactgttgccaatgagaacatatttctggtgctgctgcgcgaccagatctacggctttcaccagagcgccgaaaaaggcatcggaaacatccataaccacgacgccgatggtgtcgctcacctgagtggccagcgcttgcgcattcgcatttggccgatatcccagcagggtgacggcctgcataacggcgtcacgggtgtcgggactgaccaacgcgctgttattcagtacgcgggaaacggtcgctacagacacgccagcctggcgcgctacatcacgaatggtgatcatattcactgccctgtttgagttcaaaaatgctcacaaatgccccgttagcaggcggctattttgtcagcaccctgcccagggctgcgtgagaaacatcacagggatggaaacggttacagccattttgttaatgaatgtgatccagatcgttatctgagcgatcctgacgcgcgcaacgtgagttgacgccataaccactcgaccggtccctgtcgccagaaacgtagccagatgacggaaaagagaaggtttattgcccataccggaacgacaaagaacaagagttccagtcgattgaatttcataaataagccaaactgataaaacagcgtggtacagatgatcgtctgcagcagataattggtcagcgccattcgccctacgcaggcaatggcaagcgtcagtctgcatcggctaagctgcggccagaagccaaacatcagcgcggcatagcccagcgtttgcaacggcgcgctcagttcgcgcggcgcctgcaataagaaggcgcaccagcggtacgcccagtccagccgccattgtaagatgaccgcaggcaggttgatcattagccctaacgccaccagcagagccccggtacggcgatagtgccgcagactgtactgacctttcagccagccgctacgcattagcgcagcgcccagcagcatcatacccgccagttgccagccatactgcgcgccgagcgccagtaaactattcgacagcatctctgcccggttgctgatagcctccatgccgccattcagcttccagtatttttcatacaatattgccgacgcatccggcgtccaggcgcggctggtttcgctactcgataccacgcccagcagcagtagcacgccaatcccgaccagataaaggagtatgccggtattgaacaggctttttaccgaaggcgcatcgcgtatcagtcgccagcaaattaacccgaccagaccgtaggccagcagaatgtcgccgtcccaaaagaataacgcatggataaaacctaacagtaccaatagcgttaagcgcgactgaatccactgtttaccacgcggaagcagcatttgtagccccgcgccaaacaacaacgcgaacagcgtaagaaacttagcctgcgccacaatatcgagaatcgcccaggaccaggcgtcttcgggaacgatcgcgccgtaccaggcgggattgagataagccgccttcggcaatccaaaggcgctaatgttaagaagcaggataccgaggatagcgacgccacgtacaaaatccagcgtgacattacgctccatcgtctccaccttaatcatggatgatggcgaacggcacgcagaaactcctggcgcgtattctggctggacttaaacaatccgcccagcgacgtcgtcgtcgtggcgctggttgcgtcacgaataccgcgcgctttcacgcagtaatgcaccgcatcaatcgataccgctacattattggtgccgagcaaggtttgcagcgccgtcagaatttgttgggtcaaacgttcctgaacctgcggacgctgggcgaagaattgcacgatgcggttaattttcgacaggccgatcacggaatctttggggatatacgcgacggtcgctttgccatcaatggtcacgaagtgatgttcacaggtgctggtcagcgtgatatcgcggacggtgaccatttcatccaccttcattttattttcaatgagggtaattttcgggaaattggcatagtcgaggccggcgaaaatctcgtcaacgtacatcttagcgatacgatgcggcgtttccatcagactgtcatcgctcaaatcgagattcagcaactgcataatctcagtcatatgccctgcgataaggctttttcgcgtttcattatccagttcatccataggcgggcgcagcggcgtttccagcccccgggcaaccagcgcgtcatgaaccagggccgcttctttactgagtgatggcattaatcgtgttctcctgcaggtgtggcgcctctgccctgcatggggcaaagtttgtcaatattgtgacagtgtgattattgtgcgtgaggtagcgcacataatccagtattcacgcccataattgttgaaattgtcgctgcctttcatgacatctgttccggtgcgaaaatgatggcaggacaaagggcatatttgttaacgcaacgttatttaaatgatgaagcatgtttatgtattacggaagtgaaagttactcacaacgcggtgaataatctgtattatgaagaatctgcataccttatcaggttcactataaaaggagcccccgcatggaaatgctcgaagagcaccgatgttttggcggctggcagcagcgctggcgtcatcatgccgccacgctaaactgcgccatgacattcagcatttttcttccgccgactcaggataatgaaccgcctccggtactgtactggttgtctgggttgacctgcaatgatgagaactttaccaccaaagcaggcgcgcagcgtatcgcagcagaactgggcattgtattggtgatgccggataccagtccacgcggtgaacaggtcgccgacgatagcggatacgatttaggccacggcgccgggttttatctcaatgccacacagccgccctgggccagccattatcgcatgtacgattacctgcgcgatgagcttccggcgcttatccagacacagtttaacgtcagcgaccgttgcgccatcagcgggcactcgatgggcggccacggcgcattaatcatggcgctgaaaaatccgggcaaatacaccagcgtctctgcttttgcgcctatcgtcaaccccagccgcgtgccgtggggaatcaaagcgcttaccgcttatctcggcgaagatgaatcagcctggactgagtgggatagctgcgaattaatgctggccagccagccgcaggacgccattcctgtgctcatcgatcagggcgacagcgatcaattcctcgccgatcagcttcagcccgccgtactggcggaagccgcgcggcaaaccgcctggccgatgacgctaagaatccagcctggctacgatcatagctattattttattgcgtccttcattgaggaccatctgcgctttcatgcccggtatttacgggacgagcgtgagacgtcaccaacataatgaattttccagcgccgcgctgtaattcacctcctccgactgcggcgcggaagatttattatttaaatccgcggcctgctggcgtacctgaaggcggccgctgccctctccgccttcataactttcgtgaaaattacgcagctcggattcaaacagcaccgcatcaagattatgcaacttatccagcgcccgcaggagagaaattaacgtatcaagattgagccctcctcccttctcgatacgcttgatggtggcaatgccaacgtgcgcgcgatcggcaagctgctgctgggtcatcgaaagagacagacgcgtctcctttaagcgggcgcacaacgacaggataatctcgtcgttattcatcgtattgtatttcacgcggttaccctctcttgcgcggctgaattttccccagcgaaccatgatacgtttcacggtatttagcgctcatgtctttaccggtctcgtacatcgcagcaatgatctcatcgagcgaaatacagggttcgcttacgcgactcatcgccatcgtcgccgcgtttatcgctttcacggcagagatagcatttctctctatgcagggaatttgtacctgtccgcccagcggatcgcaggtcaatcccagatgatgttccatggcaatttcagcggcgctcagcgtttgctccacggatgcgcccattagttcagccaggcccgccgccgccattgagcacgccacgccgatttccccctgacagccaacttcagatcccagaatagaggcgttttgtttaaacaacatcgcgatagcggcggcggtcaggaagaaacgggtcagagcaccgggctccagcggcgtgacaaatttatcataccagcaaagcgctgccggaatgatgccgcacgcaccattggttggcgcggtaacaatctgtccgccgctggcattttcttcgcttaccgcaatcgcgaaggcattgacccagttcagcgcggttaaaaaatcgctggcggagcgattagcctgtaacgtcttatgtaacgcgcaggcgcgccgcggtacctgataggggccgggtaataccccctcagtatgcaggccgcgataaaccgcctgctgcatcacgtcccatatttgcgccagataattctgcaacgtctgtggcgagtggcggcacagctcatttttcatcatcagcgccgccacggacaggccgttacgccgacacagcgccagcaactgcgcggcatgactaaattcaaagggcgacactgtacgcaaaggaagcgatggcgtcagcggctcgccatgtttgcgaacctgtccggcgccggtcgaaaaccaggtctcttcatacaccgtgaaataatcatctctggcgcgaaacgtcatggcataaggatggcctggatgcgcctggtgattggcgataatcttgacttttatcgtgattccgcccgcgtcggagagcgggagttcgattttgttttcattttccgcacgcttaatcaccgccatatacgaacggagatcgacattctccggctggcaacccagcagcccaagataaagggcggtatccacattgtggcacttgcggcttaacgataacgcgccatacagctcgatttcaatttcccgaattagcggtaacgtctcttgttctctgagcaatgaaataaagtgacaggcggcgcgcatcggccctacggtacgtgagctggatggacctattactattttgaatatatcaaggcaactctccatcgttatatcaatcctttcagtgtcattcgcgttcagtaataaataacatcctcgcacagttggcatatcaaaagtgataccttttgtgtctgaactttacctggtatcaaaaacaacgcttttttagcccttttctggctgtgatatctgtgatagcacgagattccacgccgcaaaagagccattataatacccgtaaattaagggagttatcatatgagcattatttattttattactacacaggatatcgatacgtttcagaaaaaattacaggaaacgttatttaatgccgtcaccatgccgtttccgctattatttgataaacgttatgccgcgcttatcaataccgcttatttaaagcttacgctgccagcggaatgtctgacgcctgaattttatcgctatttacgcgaactctcattgcaatggcagtttgatttttttattaagccgcagccactgcctgctaacggtattatcgcgtttgatatggactcgacatttattgcggaagaaggcgtggatgaaattgcccgcgagcttggcatgtcgacgcaaatcaccgccattacccaacaggcgatggagggcaagcttgattttaacgccagttttacccgacgtatcggaatgttgaaaggcacaccgaaagcagtgctgaacgccgtatgcgatcgcatgaccctttcgccaggcctgttaactattctgccagtcatcaaggccaaaggatttaaaaccgcgattatctccgggggactggatatattcacccagcgtctaaaagaacggtatcaactggattatgccttttcgaatacggttgaaatacgcgataacgttctgacggataacattaccttgccgattatgaacgccgcaaacaaaaaacagacgctggttgacctggctgcccggttaaatattgccacggagaatattattgcctgcggtgatggcgccaacgatctgccgatgttagaacatgctggcaccggtattgcctggaaagcgaagccggttgtacggaaaaaaatccaccatcagattaattatcacggtttcgaattgcttctttttcttattgaagatgaattataacgcgactcacctcgccggaagggaattttaaaatgagtataaaaacatttattttcagccagcccgataagccgattgtaaaagagaaaaaagagatagaccagacctataaaaaatttcgttttgagattatcgcctcggtctttatctcttatgccgtcttttatcttacccgtaaaaacttctccgccgcgatgccggccatgctgacggaaacgtcgctgaccgcagaagacttcgccattatgtcttctattttttacattctttatggcgcgatgaagtttgtcggcgggatgctggtcgataaaattaacccgaaagccatgaccggcccggtgctgattggcgtggggattgtaaatattctgttcggcttttccgacagcgtggcggcattctacgtgctgtacagtctcaacgcgatattacagggcaccagctttccgccgatggcgaaaattatggcctcgtggttttcgaaaaacgaacggggacgctggtgggctatcgttgaagcggcgcacaatatcggcggcagcctcgcgccgctgctgaccagttttgctatcgcctttagcggtagctggaaaatgggattttatgttcccggcgccatttcgctgctgatggggatagtggcgctatttaccattaaagatcgtcccggtacgttaggtttgcccaacgtggggcagtggcgtaacgacccgacggaactggcccaggtcaaggccagcccggtcaacctgagcttctggcagatttttgtgaaatatatcctgaccaatccactggtatggatcattattatcggtgatatgtcggtttatattgcgcgcactatccttaacgactggccgcagatttactattcgcaggttcacggctggagcctgataaaagcgaactcgattatttcctggtttgaggcgggcggactggcaggtgggttgctggcaggctacttgtctgactttatgttcaaaagtaaccgctggatgaccggattaatcttcgcgttagcgctgtgcatatgcatcgtgctggtgccgctggttcaggatacctcttacaccctcaccgcgattctgttcaccatcatgggcttcgccttatacggaccgcatatgctttttgccgtcggctgtctggatgtgacccataaggatgcggcgggatcgattaccggctttcggggattgttcagctatgtcggcgcggcaatggccggtgtgccggtaattatggtgaaaaatagctgggcgtggtcgggcgtttatatctatgcggtgatcgccattctgctaacgactctgtcgctggcgctgctctccaggctgcatcggttataacattctggcgacagcggcaaaacgcggctgtcgccagtctctgtcagaaacggtaatccaccgccataaagtaacgacgtccgtcttcggtataaccgtagtcgtcgcgtttgagatctttatcgcccacgttcagaacgcccgcacgcagtttaacgtttttcgtcgcctgccatgccgcgccggtatcccagaccacgtacccgcccggcgttttcgctgttgcgctgtcggcccgcttacgcccggtataattccctgatacgtagaatgaccagtcttcgagctgcaccggtttccagtccagcgtaccgttcgcggtgtggaacggcagatcggaaagcggcttgttcccgccattactgacgtcgcgcccgtcgttataggtgtaattcaacgacagtttccacgcctcgttaaacggaactttcaactcggtttccacgccctgaatacgcgctttattcacgttgtaataacggaagaccggaacgcgctgtccccgactgttggtttcgaaaccgacaaagttggaatagccgggcgcggcgttaacgtcaggggtacggctaatgctgatgcgattgtccacatcgttacggaacgtggtaacgctcgcttccacgccctccagtatgccttcttcgccccggtaataaaggccgagctcccagctttcactggtttcaggtttcagatccgggctaccgacaatgcggcatccgccacggcaggagttggtcgcccagtccgggcttaattgcaatagcgacggcgctttaaaggccgtggcccacccacctttcaccgtcagggtatccgttgcgttatagaccagataagcacgcgggctccagtgatcgccataggtttcatggtcatccatacgaataccggtggtcagcgccagcggttcgaagatgcgccactcatcttcaaggaacagagcgtactggctggcggaggttttagtactggaaccgccggtcaggttcaccgcatcgctcagtttatcgtgacgccattcgccgccgaaggtgaggaactggttgacagacgctaacggcagaacgtatttcccgtcaatcgaattgctttctgacgtgatagggctactgttgccggggtttttgttttccactttttcgccgtagaatttgagctcactattgccgagatcccaacgtccgttatggctcaacgcatagttttgccgttccagacggtttttatccagcgagtctgagtcccggtcctggcgatcaaaaccgtagcctgcggtaacgtcatgattttcgtttggtgtccaggcaaactcgacgtttccatcccggctggtaaatccttcaatgcgcggcgtttcacccgtagcggtggtggcggaactctgctgctcgtctttttcgcgtttcgccaggctaccgtaggctttcattcccagcacgccgtcgatcagcggaccgctggtaaagaactgaccgttataagtatcgccacggtcgcgatgttcctgaatagtggagtcaaccgtgacgctgccgtgccatttctgaccaatttttttggtgataatgttgaccacgccgcccagcgcatcggagccatacagcgaggacatggggccacgcaccacttcaatacgttcgatagcgtcaaccggtatccagttcagatcaaaatcattatggcggaagaccgcgttacgggagttaacgcgcttaccgtcgatcaggatcagcgtataactgctgtccagaccacgaatactcacgcctttacggttatccccttcgttagtgagctgtacgcccggcacctctttcaggacatctttcaggttttgcacgggcctgcgctgtaaatcttgctgggtaatgacgctgatacttgctggcgcatctttcagattttgttcgatggcggacgcggtaacgaccatggtttcaccatcatccgttgccgcggcaaccggccaggccaacgtaactgcggacatacaaagccctacccgaacgaaagggttaaacctaaacattccatttctccatgaggtaaatacgacaaaaaaatcggttatcgctcacaacgcattacgtttcgcctgcgataacggttatcacggcgaactctttttatgcaggcgagtcgggctcatgagtgacggtcgcgcccgaatcttcatcctttctgatttcgagcgtaacgataaagcaaacgataataattatcaatttaattgttaataattatgtcatttgaaccaatcatgaagaaaaaacaaaaaaccctctcgaatgagagggttagaagagtcaggttcaggcagtcagtgccggatagcggcataaagcctatccggcctatgacgagaataccgcgttactttttaacgcgttccgggaagtgcatttcgctatagcgcacgaaatgcgtaccttttatcagcttgtagccgaaccagataagcaggaacagcggaataccgatataggtcgccgcgacgccgccccagtcgatggtatctttcaggaacgcttcatagttctgccccaacgtaataatcaggcacagtacaaaggcgaaaatcggccccagcgggaagaacccggaacggtacggcaaatcattcacatcatacccttgtaacacgtaaccgcgacggaagcgataatggctaatggcaatccccagccaggcgatgaagcccgtcataccggaggtgtttaacagccacagatagaccgtctggttgccaaacattgaggtcaaaaagcaaagaccggcaatcacggtggtggcataaagcgcattgcgcggtacgccgccgcgggacaatttcgcaaaaatacgcggggccttaccgtcacaggccagggtgtagagcatacgggtcgaggcatacatcccggagttacccgcagacagtaccgccgtcaggataaccgcattcattatcgccgccgcagacaacaagcccgcatgctggaacactaaggtaaacggactgacgctaatgtctttgacgtcgttacgcagcaggtttggatcggtataaggaatgatcaggctgataatcaaaatcgcgaaaacataaaacagcagaatacgccagaacacctgacgcaccgcgcgtggaatattcttctccgggttttcagattccccggcggcaataccaatcagctcagttccctggaaagagaagcccacgatcatcgcgacgccaatcattgccgcaaaaccgccagcgaaaggcgcatcgcccgtcgtccagttgctccagccgaccggctcgacacctttaaaaatgccgataatcatcgctacgccaacgatgatgaagataataacggtcgcgactttaattaacgagaaccagtactccgcctcgccaaaaccgcgtacagaaatgtagttcagcaagaaaatgacacagaggaatagcgcgctccagatccagcccggcgtgtccgggaaccaccagcccatcaccaattgcgcggcaaccaggtcaacagcgatagtcaccgcccagttgtaccagtagttccagcccagcgcgaaaccaaagccttcttccacatagttctgaccatatgtcgcaaacgagccagatactggcatataggccgccagctcgccaagactggtcatcaggaagtagaccatcaaaccaatcagaatataagaaaacagcgcgccgcctggccccgcctgagaaattgtcgcaccagatgcaacgaaaagacctgtcccgatggagccgccaatggcaatcatcgtcaggtgacgcgcctttaattcgcgacgtagcgcgggcgcttctgtggttttagttttggaacccatgtgaaaatgctatccatccaaaaaatgaggcgcgattgtaacagacgaaatactatccttccgacacaaatgcgcggttataagagaccttcatgaccggccacggattataagtaaagcagagaataacgtatacgtaagcggatactaaaaatggcgatgccgcccgggcagccctcctcttcacctttattcacagtaactcaaaaaacgctgcaacgcgttagaaagatgtttctgccgatgatgaacacgccacaacgtgcgcaccaggcgcggtaacggcaccgcgacttcgcccagggttcccgcctggagttgttcagcaatcacccggcgcgataaacaacttatccccagtccatgacgcaccgcatgtttgatcgcttctgaattccccaactccatcgccatatgaaagcgcggcaaatgcgacaacagcaaataatcgacaatttcccgcgtaccggaaccgcgctcgcgtaaaatccatggggatgccgcaagctgttccagcgtcaccggcccctgcgtcagcggcgaggacggcgcggcaaagaccaccagctcatcttccagccacggctcagagataatctctgtactgtgacatggtccttcaatcaggccgatatcaacccgaaaatccagcaccgcgttaatcacgtcctggctgtttcccacgctgagttccagcggcaaggccggataatgctggcgatagcgggcaatcatagcgggtaaaatgtaattgccgatggtgctactggcataaacccgtatcgcgccgttatcttcacgaaatagctgctcaatttctatcgcttgctccagcaatgccagcgcgcgcgggtataacaagcgcccatgttcgttgaccaccagccgtttccccacccgatcaaacaactgtacgccgagctgaccttccagatcggtgagcgcggcgctaacggcggactgcgataatgacagcatgaccgacgcctgggttgttgaaccgcttttcagtacttcagcaaacacttcaagttgtcgtagcgtaatatgcatagtcgtatcccaccgatagcgtttcacttaccacttataaagattaattataaatatataatcaattttatttttaaaccagatcaccgtaaccttattgtccatatacaggagaaggttatgacagaactcaccttgcagaatcatcgtcgtacaatgtggcattttataccggggctcgctctgagcgccgtcattacaggagtcgccctgtggggcggcgctatccctgccgttgcaggcgcggggttcagcgccctgaccctggctatcctgctgggtatggttatcgggaataccatctatccacaaatatggaaacaatgcgacggcggcgtgctgtttgcaaaacaacatctgctgcgtttagggattatcctttacggcttccgccttaccttttcacaaatcgccgacgtgggcattagcggcattgtgattgacgtattaacgctttccagcacgttcatgctggcctgcttcttaggccaaaaagtctttggtctggacaggcacaccagctggctgattggcgccggtagcagtatctgcggcgcggcggcggtactggcgacagaaccggtggtaaaagcggaagccagtaaggttactgtagccgtcgcgactgtcgttattttcggcaccatcgctattttcctttacccggcaatgtatccgctgctggcgcactggttcagcccggaaacttacggcatctatatcggctcaaccatgcatgaagtcgcgcaagtggtcgcagcgggtcatgccgttagcccggatgcggaaaatgcggcagttatcgctaagatgctgcgtgtcatgatgctggcgccgttcctgatcattctggcggcacgcgttaaacagctttcaccggcgaccggcgcggaaaaaagcaaaattaccattccgtggtttgctattttcttcatcgtagtggcgatcttcaactctttccacctgctgccgaaagccgtggtggatatgctggtgacgctggacacggtgctgctggcgatggcgatggcggcgttgggtctgaccactcacgttagcgcattgaaaaaagcgggggcgaaaccgctgctgatggcgctggcattattcgcctggctgattattggcggtggcgccattaacgtcctaatccatagccttatcgcataaattattacgtttcacgcctgttaacccgttatcatagcgttcgtaatgaaccgttagcgggtttaacaggagtcttttatgaaatacatcggagcgcacgtcagcgctgctggcggtctggctaacgcccctgcccgcgcggctgaaattggcgcaacggcctttgcgcttttcacaaaaaaccagcgtcagtggcgtgccgccccccttactccccaggtcattgatgactttaaaatcgcctgtgaaaagtatcatttctcggcggcgcaaatccttccccacgatagttacctgattaatctgggccatccggtcagtgaagcgctggaaaaatcacgcgatgcctttctcgatgaaatgcagcgctgtgaacaactcggcttaaccttgcttaattttcatcccggtagccatctgatgcagattgcacaggaggattgcctggcgcggatcgcggaatccatcaatattgccctcgcgcagaccgagggcgttacggcggttatcgaaaatacagccggtcagggcagtaatctggggtttgagtttgaacagttagccgccatcatcgacggcgtggaagataagtcgcgcgttggcgtctgtatcgatacctgccatgcctttgccgccggatacgatctgcgtacgccagaggcgtgcgaaaaaacattcgccgaattcgggaaaattgtcggatttcagtatttgcgcggaatgcacctgaacgacgccaaaagcgccttcggtagccgcgttgaccgccatcacagtctgggtgaaggcaatatcggccacgatgcgtttcgttggattatgcaggatgggcgttttgacggtattccgctgatactggagaccatcaatcctgatatctgggcggaagagattgcgtggttaaaagcccagcaaattgccgaagcgatggcctgacgctcaatgttcttcaggcaataaaaaaggcagagcgcgctctgccttttttagcgtgtttctcttatgccgcttttgccgtgacttccgtctccggacgtttcaggacggcataagccagccctgccaccagcgtaccggccacaattgccagcaggtatcccaataccggcgtaattgcgcctgggataagcagaacaaacagaccgccatgcggcgccatcaattttgcgcctaccgccatagaaatggccccggtcaacgcgccgccaacgatacagcacggcagtacacgcatcgggtcgcgtgccgcaaacggaatagcgccttcagtgataaagcacagccccagcaccaacgccgctttaccgccttcctgctgcgctttgtcgaacttacggcgcgccaccatcgtcgccagacccagcgctaacggcggtaccatacctgcggccatgatcgccgccatcggcgcgtaagtttgcgtactcagcagaccaacaccaaacgcatacgccgctttgttcaccgggccacccatgtcggtacacatcatcccgccgagaatcgcgcccagcagcaccgcgtttaccgtccccatggtttgcagccagtgggtgagcccttccagaatcccggcaaccggtttaccgatcaggtaaatcatcgccagccccaccaccagactggaaattaacgggatgatcaggattggcttcagcgcttccatactttgcggaagtttcagtttggtactgataagcttcgccatatacccggcaaggaagccggcaatgatcccgccgataaaaccggaaccggtgctaaccgccagcataccgccaatcagacctggcgtaaggcctgggcgatccgcgatggagaaagcgatatagcccgccagtaccggcaccatcagcgcaaacgccgaaccgccgccaatctgcatcagcgccgccgccagcgtgtccggcaccttaaaggcttcaataccaaaggcgaaggaaagcgcaatacacagtcccccggcaaccaccataggcagcatgtaagaaacgcccgtcaacagatgccggtatgcgccagcgctctctttcttcccttcggtcgccgcttgcgatgccttacccgccggttgatacggcgtcgcttccgctacggctttatccagctcctgcgccgtctttttcagcgccaggccggtcgacgtgcggtacatcgggagaccggcaaacttcgccagatccacttcgatatccgccgccacaatcactaaatccgcttccgccacctcttccggggtgatggcattgccggcccccacggagccgcgcgtttcgacttttacccaccagccgcgttttttcgcttccgtttcaatggcttcagccgccataaaagtatgggcgacgccggtcgggcaggccgttaccgcgaccacgcgtttcggaccgccgctcgccgcaggaacagccgcagcaggggcgctgtaaggggtcgcatggcttttggcttcactcagaaacagttccggatgcgcgacggcgcgaccaatatcccccagccaaacctttttgccgttcagagcattgtcgttcggcagagattcgcccagcacgatcgccagctcagcatcattcggattgtcgataatttccagatttgctttatgcgccgccgctccaagcagggttttcgccatgtaagcgcgagcctggccgagattagcgtcaattatcagcagcgttttcattatgcctctcctgctgtcagttaaacggttgtaagtcgacacgcgccatcattgcggccaactgaggacgatcggtaatacccacattgctctggctgaccgccagcgcggcaaccgccgtcgccagacgcagcgtatgttcgctggactcgcgcatcagcaggccgtaaatcaatccgccaaccatggaatcgcctgcgccgacggtacttaccacgtcaaccgccggtggtttagcgatccattctcctgaggcgttaacccacagcgcgccttccgcccccagcgaaatcaccacatgggcgataccctgttcgcgtaacgcgtgcgccgcatcaatcacatctttcatttccgggagcttacgacccgcccaaatttccagttcgcggcgattcggtttcaccagccacggcgcagctttaagaccggcgactaacgcttcacggctactatcaaagataatgcatggacactggctgcgcagacgcgtcatccagtcggtgaacgcttccggactcacgccagccggtaagctaccgctgacgcagaccatatcgaactgacccagccagctcagggagtcgttaacaaagcgttcccagtctgcgggagtcacgtcaaagccggaaaagttgaagtcggtcacttcgccatctttttccgtcagcttcacgttgatgcgggtccggccctgaaccacctgaaagcggttagcgatacccagttcgctgaacaattgctgaaaaccgtcctggttatctttaccgagaaaaccgccgacggtgacgtcgatgcctaagtctttcagcactttggcaacgttaatgcctttgcccgccgcgtgcagacccgtggttttcaccaggttcacttcgccgcgttcgatttcagggcaaaacccaaccagatcgtaagccggattaagggtaatggtggcaacacgcctgctcattatgcgccctccccgagaccggcggcgatcgcatcgccaatcgctttcagcgcctgttcagcatcttcaccctgcgcggtaaagcgcagacgatggcctttcttcacgcctaacgccaccactttcatcagactacgtccgtttgccggtttgccggttccatcaaggtttgtcacggtaatttcactgttaaattgtttaatcgtattcaccagcatggtgcccggacgggcatggagaccatgctcattacgcactacaaattccgcgctcagtacgtcatccgtcagcgcatcatcactggtcagcaacgccagcagcgtcgcggcgtcagcgctcagcagacgatcggctttattgttcagcaacaggtcgccgaggcgttttagcacggcaatcggctgctcatcgttcatcgcgacagtgactaataaggctgctttttcaccctctacgtcaaacgcctgggtcgcacggcttaccgcaacagcgctgcgcaaattgccttccgcgctgtcgttcagccagatgccttgtcccagattcatcggactatcgttaatcgtttttgcgacgaacgccgcatcaaccgctcccgcctctttcagacgcgccgcatttagcgcctgcaatgtgaccagcgagctggcgatgacatccagcgtcatcgtctcgttatcaagttttaattgttcactttgcttctcgcccatcagcaatgcgcgcagctcttccgccgttgtcgcggatttcagctgttcagccacggagtcatcgcttagcacatgcgtcagctgacgcagcaggccgaggtgttcgtccgaactggcggcaataccaatcgccacgtaggcgacctggccttctccccaggtaacgccctgcgggaattgaaagacctggacgccggttttcagcacctgatcgcgcgtgtctgttgtgccatggggaatcgcaataccattgccaagaaaggtcgaggtttgctgttcgcgcgccagcataccgtcaacatagccgcccgccacattccccgcctgcgctaacgcggcggcgatttgccgaatggcctcttctttatttccggcctgctcgcccggatgaatgtcctgaaccgataactggaacatgtgtctcctctcctgctgaattgaaacgattcagccgctatgagaaaaaaagcgccaatctgagttatcaaaaaaaccagatcgcgctgaaacgtttcaagaagtctggatctttctgcttcagcacgcaagaaaagttaccggttttgtagcaattttttgaggtgaagcacattttttctccaacagaccctcaatagctgacgcataaaaggcttcagcttttttctttcagcttgcgtcagcacgccctggtaacaaactggaatgctattttgatttttcgtgtcgattttgattcagacgcctgtttattttctgacgggcagcgtaaactccgcctctcttcacaccactgatatagaaacatgcacaacagtcccgccgccgctgcgcctaaatcgtttgacctgacgtctaccgcctttttgatcgtcgcttttctcaccggtattgccggtgcgttacagacgccgacgctcagtatttttctgacggatgaggttcacgcccgtcccggcatggtgggtttcttttttaccggcagcgcggttatcggcattatcgtgagccagtttctggcgggtcgctcagataaaaaaggcgatcgcaaaaaactgatcgttttctgttgcgtgctgggcatgttggcctgcgtgttgtttgcctggaaccgcaactactttattttgctgttcatcggcgtctttctcagtagcttcggctctaccgccaacccgcagatgtttgcgctcgcccgtgaacatgccgatcgtacaggtcgtgaagcggtgatgttcagctcaatcctccgcgcccaggtctcattggcctgggtcattgggccgccgctggcctatgcgctggcgatgggttttagctttacggtgatgtatttgagcgcggcggtagcttttatcgtctgcggcgtcatggtgtggttctttttaccgtcaatgcgcaaagatgcgccgctggcaaccggcacgctggaagcaccgcgtcgtaatcgccgcgatacgctgttgctgtttgtcatctgtacgttaatgtggggaactaacagcctgtatatcattaatatgccgctgtttatcatcaatgagctgcatcttccggaaaaacttgcaggcgtgatgatgggcaccgccgccgggctggagattcccacaatgctgattgcaggttacttcgccaaacggttgggaaaacgcctgttaatgtgcatcgccgttgtcgccggactgtgcttttatgtgggtatgttgctggcgcacgcaccggcgacgttgctcggcttgcagttgctgaacgcgatttacatcggcattcttggcgggattggcatgctctattttcaggatctcatgccaggccaggcgggttcagccaccacgctgtataccaataccattcgcgtcggctggatcattgccggttcgctggcgggaatcgccgcagaaatctggaattaccatgcggtcttctggtttgcgttagtcatgattgtcgccaccatgttctgcctggcgcgtattaaagatgtttaacttgcaagcctgatacttttactcttcgacacatttcagcgcagagtttatctctgcgcaatgttcatgcgcggtcattcattgtctttttctcaatacgatattctgttagcgccctcttacataagagaccggttattgagaaaattacgcccatcagtccgcaaagaaccaacaccagccgcatcttatattttggtgtgacagcaacatctatcacttcaatgttagcattatttttaaccgcctccgacaacaaggatagctttgcatatgtttccgtttgtaacatatttttatgcacgctataacgtttaatgtcaccatcatcgatataccatgccgccattttatcgacactatttttcagggtggaaataatattattgacgctttcttccctcccctgcgccttaaaaagaacaagctgatttttcgcgtcaaaacttattttatttttatattccgcaggcaagaaacggctaaactggttaaggataaccgttgttttacattgaatatcattagtatagccacataacgcataggtagcaggcgtatccagattaggtttgattgtcatactcacaacctttgtatcatgctgcacgctcacaaaaacatagccaatggcaacaaaaataaaggtagcgatcatgatacttagccattttcttataaggaataaggaaacgtcgactaaatcaatttcactattttctccccgcatttcacatcccttttaaaacgctaatagtcaacccgaatactgaaataacaaaaagcaacaccagcgtaaaaataaacgccctggctgcgaacgtatatttcttcataagataaaacccacacataagaattcgagtattttaaaggaaaataacaatacattcacactggttatatcgatcggtaaatacatcaatgatagatataaactatcaaattcatgatatcgatcgttataaataattaaaatcgatcaaaattcctctttttaatagataaaaactatcatataaataaaattgatcgtttttgttttatgtgacggttcattcggtacacgttcaggcaccaacggggttgagcggcgacatctaccgcttcagaagccacgaaataagggaatcatgtattacgctatttaatggtaaaaggaggtaatttgaggcgcagcttttgcagactatttcgggatataacgtaagcccctgcacgtttatcaaaaacggcatagctcatggtaaggttttctgttcgagttccagcaaataaataatggcctcttcccgggtcgttaaacacatgtcccctgtcggttgcaaaccagagcacacttttgggcgtaaaggcgagccaaagataaggcacaagttatcttccgaaagctgcacgcatctggtattcatcggcttgccatacggcattccgggtatcggcgacgaaattgaaggcgcaatacagcaagcgccacaaccgctacgacagtccatgctcagccctctatttataaccaaatgaaagataacagaatttgtccaaagaaaaatccagatttaaaatgtggacgtcatcatgatcagacctgccctcagacattccgaagacaaggctggaaacagaagggacaacacagcacacttcccccctccgggcgacatgccatcgcgtattctcgttgaacgcggggcggaaagcgggcgaacagtatcaccttttttgcaccagcaaaagtgacaattccacttgcctggatggcccggcgcgagtagttttacgcgatattttagataatctctacaacaggatctcctcgatgccaagagcgaacgaaatcaaaaaaggtatggtactgaactacaacggcaaattgctgattgtgaaagatatcgacattcagtcgcctaccgcccgtggcgccgccacactgtataaaatgcgtttttccgatgtccgcacaggtctgaaagtggaagaacgtttcaaaggcgacgatatcgttgataccgtcaccctgagccgtcgcggcgttgacttttcttatgtcgatggcaacgaatatgtgttcatggataaagaagactatacgccgtataccttcaccaaagatcagattgaagaagagttgctgtttatgcctgaaggcggaatgccggatatgcaggttctgacctgggacggccaactgctggcgctagagcttccgcagaccgtggatctggaaatcgtcgaaaccgcgccgggtattaaaggagcgtccgccagcgcacgtaacaaacccgcgacattaagcaccggtctggtgattcaggttcccgaatacctgagcgcaggtgagaaaatccgcattcatatcgaagagcgccgttatatggggcgcgcggattaagtttcacatttttcggctgcgccccagggcgcagtctgccccttttatttattgactgttctgcaccaggcaagagaaacgttaaaaatttaacattttctgctcttaagatggcagcagcacgacttcgtcaactcagcacttctctttttcacgtttattcgccaggattattaaaagttgttatgttgtatcaatatcctggagctgacgtgaccaaaaccaatcttattactggatttctcggtagcggaaaaaccacctctatccttcatttattagctcataaagatccggctgaaaagtgggccgtcctggttaatgaatttggtgaagtgggtattgacggcgcgctgcttgccgacagcggcgcactgctaaaagagatccccggcggctgcatgtgctgcgtcaatggattgcctatgcaggtggggctcaacacgctgctgcgccagggcaaacctgaccggttgctgattgaaccaaccggactggggcacccaaaacagattctggatttattaactgcgccggtttatgagccgtggattgatttacgcgccacgctctgcatccttgaccctcgtctgctactggaccaacagagtgtcgccaatgaaaatttccgcgatcagctcgcctcagccgatattatcatcgccaataagaccgatcgcgccacggcgcagagcgatgccgccctgcaacagtggtggcgacagtacggcggcgatcgtcaactgattcatgccgaacatggacagatagacggtaagcttctggatttaccgcgacaaaatctggcggaactgccggccagcgccgcgcattctcacactcatgccagtaaaaaaggactcgccgcgctaaatctgcccgcccagcagcgctggcgacgcagcctcaatagcggacaaggtcatcaggcctgcggctggattttcgatgccgataccgtgtttgacaccattggcctcctcgaatgggcgcgtctggcgccggtgggccgggtgaaaggcgttatgcgcatacaagaggggctggtacgcatcaatcgccagggcgatgacctgcacatcgaaacacagagtgtcgcgccgccggacagccgggttgaacttatctcaaacacagaaaccgactggaatacgttacagacggccttgttgaagcttcgtttagcgacgcacgcgtaaggttgccaccgtttaaaaactatggcgaaatgacgatgaaaacccgctattccttgataattctgcttaatgccgccggtctggcgctgtttttgtcatggtatcttcccgtcaatcacggcttctggttcaccattgattccggcatattccacttctttaaccagaaactggtggaaagccacgcgttcctctggtgggtcgctattaccaataatcgggcgtttgacggctgttcgctgctggcgatgggcggactgatgctcagtttctggctaaaagaaaacgcatcgggccggcggcgcattgtgataatcggattggtcatgctactaacagcggtggtgcttaaccaactcggtcaggcgctgatccccgtcaagcgcgccagcccaacgctctcttttgagcatatttatcgcgtcagcgagttgctgcacatcccgacaaaagacgcgtcaaaagacagtttcccaggcgatcacggtatgatgctgctgatattttccgcctttatgctgcgttatttcggcaaaactgcggggattatcgcccttattatatttgtggttttcgcgtttccgcgcgttatgattggcgctcactggttcaccgatattgtggtcgggtcgctcacggttattttgattggcctcccctggtggctgatgaccccgctcagcgaccgggcgatagcgctttttgagaattatctcccgggcggaaataaacaaattttaaacaaataacctatgtaattaacattaccttcagcgatagttttacatcgttgaaggtaatttatgatgatattcccccagcccatcatttttcggtcatattattcctctgcaaaatgaacagtttgcccgatttttaaacgatttgcgcttaatttgacccgtgctgatagttcactttttgtatcataaattcttataaaaaatcacgcgaaatcgctcgcaatgacagcaacaatcgggtaatctcaaactcgttttgcctcgccagataattattctcattgcgaataaatttgtgcgttccgccacagatttgtgcacaaagaattgtctcaagctgtgcaggtaattagtctcatcacgtttggcatttttataacgatatttatcgttaaggacttcaagggaaaacaaacaacatggtcaaatctcaaccgattttgagatatattttgcgcgggattcctgcgattgcagttgcggttctgctttctgcttgtagcacaaccaccaataccgcaaagaatatgcattctgagacgcatgctgtgggcaatagcgatagctcttcactgcaagcctctcaggatgaatttgaaaatatggtgcgtaacctcgacgttaagtcgcggattatggatcagtatgctgactggaaaggcgtgcgttaccgcctgggcggcagcactaagaaaggcgtcgactgttccagctttgtacagcgcaccttccgtgaacagtttggtttagagcttccgcgttcaacctatgaacagcaggaaatgggcaaagcggtttcacgcaataacctgcgtacgggcgatctggttctgttccgcgccggctccactggtcgccatgtcggtatttatatcggcaataaccagtttgtccatgcgtctaccagtagcggcgtcattatctccagtatgaacgaaccgtactggaaaaaacgctacaatgaagcgcgtcgagttctgagccgcagttaatcttcatcaggcagcacctcccttggcttacctgatgagacgacataaaaagcactgcttcagcagtgcttttgcttattatcccttctgaacccgttttgccgaatggcgacgtgtggcgtcttatccagcctacaacacacgaacgtaggcctgataaacatagcgccatcaggcattcaggtcgtttcccccaacggctactgcgacaatacgctttcctgcgcatcacagaaaagcatgactatccggggtaatccaggctatagtcttataaatcaaccagtttaaccggcatccgccttttcaggtcacaccaggaattatgctaacacgcgactcctcttccggtcggaaaatcctgcttacctgtatcattacggggatagcggcagcattacttattggtagcctgcaatttttcctgtcgtggcataaacgggatgttaaatacaatacgctcctttctgatgtacaacattacctggccagctatttcgccgacctgaaagccaccaccgatattcttcaaccgttgacgatcaacacctgtcagcaggttggcgcagaactcacctcaagagccgcttttagccttaatgtccgcgccttcttattgattaaagataaaaaagtgttctgctcttccgccactggcgccatgaatatgccgcttcagcaactggtaccggatatagatatccgcaaagacgttgctatggcgattctgcccggcacgccaatgatgcccaacaaaccgacaatggtgatttggtatcgaaacccattattaaatgacagcggcgtattcacatcgctgaatattaacctgacgccctacttactctataccacgcgccaggatgattttaacggcatcgcgctgattgtcggcaataccgctctgtcgaccttttcttcgcgtctactgaccgtcgcggagctgccgggcacgccatcacgactggcaactatcaacggcctgccgcttaaaatacggctttatgccgatagctggacctacaatgacttgtggtatgcgttgatgctgggctgcattagcggcatcgtagcagggtttatctgttactttatctatgccctccggacgcgaccgggcaaagagattttaacggcgatcaaacacgagcagttttatgtggtttatcagcccgtcgtcgatactcgtacgctgagcgtcaccgggcttgaagtcttactgcgctggcgtcaccctacggcaggcgagattccgccggatgcctttatccactatgccgaagcgcagcaacttatcgtaccgttaacgcagcatctgttcgagctgatcgcccgcgacgcacccacgctacagaaggtgatgcccgtcggtgccaaatttggcattaacatcgcgccggaacatctgcacagcgacagttttaaagaggatatgcaccggctcagggacgccctgcccgcgcaccattttcatatcgtgctggaaatcactgaacgcgatatgctccagcagtatgaagcggccaaactgttcgaatggctgcattccgccgggtttgaaatcgctatagatgatttcggtacaggccatagcgccctgatttatctggagcgatttactttagattatctgaaaatcgatcgcggctttatccaggcgatcggcacggaaaccgtcacgtctccggttctggataccgtgctgacgctctccagacgcctgaatatgctgacggtggccgagggcgttgaaacgccggagcaggcccgttggctacgcgatcacggtgttaattacttgcaggggtactggattagtcgtcctttacccctaaaagatttcgtgctgtggatgtcggcgccttctgtgcctgaatggtagcccccttacggttttaacggattcacatcagacgcaacgtcacttattattcagcgaaacgcctgccggtttgcagcgggcaatacgataaggaaaccgccttcagatgattgcgcgcgtaatgcttctgcttgtcgcactggttagcgctggcgcccaggcccaggaaatcaaagaaagctacgctttcgccgtactcggcgaacctaagtatgcttttaactttgagcactttgattatgtgaatcctgctgcgccgaaaggcggtcagatgacgctttccgccattggtacgttcgataatttcaatcgctattcgctgcgcggcaatcccggcgtacgtaccgaagccctttacgatacgctttttaccacctcggatgatgaacccggaagctattacccgctgattgccgaccatgcccgctatgccgccgactattcctgggtggaaatctcgattaatccccgcgctcgttttcacgatggcacgcccattaccgcccgcgatgtggcctttacctttcataagtttatgaccgaaggcgtaccgcagttccgtctggtctataaaggtactaccgtgaaggcgattgcgcctttaaccgtgcgaattgagctggcgaagcctggtaaagaagacatgcttagtctgttttcattaccgatcatgcccgaaaaattctggaaaaatcacaagctcagcgatccgctttcaacgccgcccttagccagcgggccataccggattactcagtggaaaatgggccagtacattgtctattcacgcgtcaaaaactactgggcggctaatctgccggtcaatcgtggacgttttaacctcgacactatccgctacgattactaccttgatgacaatgtcgctttcgaggcgtttaaagcgggcgcatttgatctacggctggaaaacgacgctaaaaactgggcaacgcgctatatcggtaaaaatttcgataatcattacatcattaaagaagaacagaaaaacgagtcggcgcaggacacacgctggctggcctttaatattcagcgcccggtatttaaagaccggcgggtacgtgaagctgtcaccctggccttcgattttgagtggatgaataaagcgctgttctataatgcctggagccgaaccaacagttacttccagaataccgagtacgccgccagaaattaccctgacgccgatgaactggtattactcgcgccgatgaaaaaagatcttcctcctgaagtcttcactcagatctatcagccgccggtctctaacggcgacggctacgatcgcgaaaatcttcttaaagctgacgccttgttgacgcaggccggatgggtgatcaacggacagcaacgggtcaatagcgtcaccggtaagcccctgacgtttgaacttctccttcctgccagcagtaatagccagtgggttctgcccttccagcataatcttcagcgtctgggcattacgatgactatccgtcaggttgataattctcaactcaccaaccggatgcgtagccgcgactatgacatgatgccgaggctatggcgggcgatgccctggcccagctccgatctacaaatctcatgggcgtcggaatacattgactccagttataacgctcccggcgtacaaagcccggtggtggataaactgatcgcgcaaattatcgcagcgcagggtgataaagcgaaactggtgccgctgggacgggcgctggatcgcgtgctgacctggaactattacatgctgccgatgtggtatatggcgcaagacaggctcgcctggtgggataaattctcccatccggcgattcgcccggtatataccatcgggttagatacctggtggtatgatgtcaacaaagccgccaaactaccggcagccaggaggtagtaagaatcaatgggcgcctatcttatccgccgtctgttactggtgatccccacgctatgggccattattaccattaacttttttatcgtgcagatcgctcccggcggccctgtcgatcaggcgattgccgcgattgaatttggccagggcggcgcgttgcccggcgccagcggcgaaggcgttcgcgccagtcatgcgcaaaccggcgtcggcaatatcagcgacagccattatcgcggcggccggggactcgatccggaggtgatcgcggagatcacccatcgctacggcttcgacaaaccgctgcatgagcgttatttcaagatgctacgggactatctctcttttgacttcggcgacagtctgtttcgcagcgcatccgtactaacgctgatcaaagatagccttcccgtctccattaccctgggattatggagcacgctgattatttatctggtgtctatcccgctggggattcgcaaagccgtccataacggcagtcgctttgatgtgtggagcagcgcgtttatcattattggttatgcgatccccgcctttctgttcgctattttattaatcgtcttttttgccggcggcagctactacgatatctttccgctacgtggcctggtctcagccaactttgacacattaccgtggtaccagaaaatcaccgattatttgtggcatattacgctgccggtgttggcgaccgtcatcggcggttttgccgccctgacgatgctgacgaaaaattcgtttctcgacgaggtgcgtaaacagtatgtcgttaccgctcgcgctaaaggcgtgagtgaaaaaaacattctctggaaacatgtttttcgtaacgccatgctgctggtgatcgccgggtttcccgccacttttatcagtatgtttttcaccggctcgctgctaattgaagtcatgttctcgctcaacggcctggggctgctgggttatgaagcaaccgtttcgcgcgactatccggtgatgttcggtacgctttatatctttaccctgattggcttattactgaatatcctgagcgatatcagctatacgctggtcgatccacgcattgattttgagggacgataatgccgcgattaagcccggtcaatcaggcccgctgggcgcgtttccgccataatcgccggggctactggtcactatggattttcctggtcgtgttcagcctgagcttatgcgcggaactgattgctaacgataagccattgctggtgcgctatgaaggccagtggtattttccgctggtaaaaaattacagcgagcgcgatttcggcggcccgctggcgacaacggcggattatcaggacccctggctacaacggcagcttgagaatcggggctgggtgttgtgggcccccgtacgctttagtgccaataccattaattttgccaccacgcagcctttcccctccccgccttcggcgaaaaactggctgggcaccgatgcgaatggcggcgacgttttcgcccgcatcctgtacggcacccgcatttctattttattcggcctgatgttaacgatttgctccagcgtcatgggcgtactggcgggcgcgctacagggctattatggcggcaaagtcgatttatggggacaacgtctcatcgaagtctggtcggggatgccgaccctgtttctgattattttactttccagcgtagtgcagcctaacttctggtggctgctggccataaccgtgctgtttggctggatgagtctggtgggcgtggtgcgcgccgagtttttacggacccgcaattttgactatatccgcgccgcgcaggcgcttggcgtcagcgatcgtgacattatcctgcgccatatgttgcctaatgcgatggtcgctaccctgacatttttaccgttcattttatgtagctccatcaccaccctgacgtcgctggattttctgggattcggtctgccgcttggctccccttctctcggcgaacttcttttacaggggaaaaacaacttacaggctccctggctggggatcgccgcctttctgtctgtcgccattctgctatcgctgctgatttttatcggcgaagcggtacgcgacgcctttgatcctgctaaggcggtataagatgacatctccattgcttgcgattgaaaatttatcggtaggtttccgtcagcaacagcacgtgcgccctgtcgttaacgccatttcgttacaggtgaacgccggggaaacgctggcgctggtcggcgagtcagggtcagggaaaagcgtgacggcgctttccattctgcgtcttttgcctacccctcccgccgtctacctctccggcgatattcgctttcacggcgaatcattgcttcatgccagcgagcagacgttacgcggcgtgcgcggcaataaaatcgccatgatttttcaggaaccgatggtttcacttaacccactgcatacgctggaaaaacagctctatgaagtgctgtcgctccatcggggaatgagtcgggaggcggcaagggcggagatgatcggttgtctggatcgggtcggtatccgccaggcgagccagcgtctgcgcgattatccgcatcagctttccggcggcgaacgccagcgcgtcatgatagccatggcgctgttaacacggccggaattactgatcgccgatgagccgaccaccgccctcgacgtctccgtacaggcgcagatcttatctctactgcgggaactccagcgcgagctcaatatgggattgctgtttatcacccataacctcagcattgtaaaaaaactggcggattcagtggcggtaatgcaacacggcaagtgcgtagagaaccaacgcgccgacacgctgctctccgcgccgacccatccgtacacgcaaaaactactcaacagcgaacccactggcgatccggttccgctccccgccgggcaggcgccgttgctggaagtggacaagctgcgcgtcgccttcccaatccgcaaaggcattctgaagcgcgtcgtggatcataatgtggtggttaacaatatcagtttcaccctgcatccaggcgaaacgctgggtctggtcggcgagtcaggatcgggaaaaagcaccaccggtctggcgctgttacggcttatccgctccgaaggccgcatcgtgtttgacggtcaatcgctggatacgttaaaccgccgccagcttttacctgttcgccaccgtatccaggtcgtattccaggacccgaactcatcgctaaacccgcgtttaaacgtattgcaaattatcgaagaaggcctgcgcgtccaccagcctacgctttcaggcgcgcagcgcgaacagcaggtgaaagcggtcatgatggaagtcggcctggacccggaaacgcggcatcgttaccccgctgagttttccggcggccagcgtcaacgtatcgccgtcgccagggcactgattttaaaaccgtcgcttattattctggatgaaccgacctcatcgctggataaaaccgttcaggcgcagattcttgccctcctgaaatcgctccagcaaaagcaccgtctggcctatatcttcattagccacgatctgcatgtagtacgcgcgctgtgccatcaggttattgtgctgcggcagggggaggtggttgaacaggggcaatgcgagcgcgtgtttaccgcaccgcaacaggcctatacgcgtcagctactcgcgttaagctgacgcctaaaaaggattattgttagaaaaaggttccgctatcgccacgccgaaatttttcagccgacaggtggcggcaaactcatcctgacgattaacgaacaggcacggctccccttcgcactccagcacggagcaaggaacttcaatatcgcttagcgcctggctgagcttatgcatcactgaccacgcgctatcgcctgccggactcaacagtttaagcgccaccagactattctcggtgctctgcccgttttgcggaatcggttcaacctttgaccccgcaaaacccgccgaccagcgatagttttgcggcagacggtgaacaattgagagctgtaatgtattcactttctttccccggaagcacaattacttcacaatttacttacatttatattaacacatcattgacaacccgtccttaaacagattgctaacgcccttctctccgtcagtggctctacagcaagcgggagttaaaatagttttaccgacacggagatagcggcgggctatatgtacccgtttctgcgatctaactcaacctttttaactacaatgatgtgactttttacataaatggattttacataaaataaacataaaggaggaaaatgatgaattggtaattgatatacatcaactatgaaagccgtttggctttgccatcgtgtagcggatagcatcccccaacgccgcctgcgcattcttcggcgccattgagggacagcgcgcccgtcaccgttttttgggacggctggcgtagagataaaacagaatggaacaggcggcgcaaagcgcaatcgaccagatcatcggccacgcactgttaaaggtagccagcgacagcaacgcgccgacgatagcgccaataccaaagcggaaagtgcccgccaacgaagacgccgttccggccatatgcggaaactcatccaaaatgaccgccatcgcattggacgaaaccatcgacacacagccgacaaacgccgcaacgccaaccaccagcgcccagaatccaatgcccatcagcgcgctgaaaaccatccacaccgccatcgcaaactgaatccatagcccggcccgaaacatgtttagcgcccctacccgtctgacaaaacggctgttgataatcgtcatcacaaacagaaatacgatgttcaacgcgaagtagtagccgaaatcctgcggcggaacatgattaatttcgatataaacaaacggccccgcgctcaaaaaagagaacataccggcaaaactaaacccgctcgccagcatatagctcagtacgcgtttgtggcgaaacaacgcggcaaagttacctattgtggtacgaatatgaaaaggctgacgccgctcaacgggcagcgtctctttaatcagagcaaagatcatgactgacgccagaatcgccgcaatggccagtatccagaagatatagtgccagcttaaccataccaacacccagccgccgacaatgggcgccattaacggcgctatcgtagtgaccagcatgacaaatgacatcatgcgcgaaaactcttcctttggataaatatcccgcatcagcgcattgatgacgacgcttgccgccgcggccgccaaaccgtgaaagaaacgcatcacgatcagttgatcgatagtctgcgccaacgcacaggcgaccgccgcagcggcaaataccagcgtcccgcccaggatgaccggcttacgcccgaggctatccgccatcggtccatagataagctgacccagcgcaaaccccaaaatataggtgctgagcgtcatctgcgcgctaccggcaggcacgccgaattgcgcagaaatcaccggcagcgctggaagatacatatcaattgacagcggcattaacatggccaacaggccaagaataaagacaatggcaaaggaagagtgctgccgggtggtcacatcgaactcctgaatttaacgagatagttagccgacgctggcgatttcttcttcagtcaacgggcggtactcgccgggagccagattctcatccagcgtaatggcgccaatccgttcgcggtgcagttccacaacgcgattgcctactgcggcaaacatccgcttcacctgatgataacggccttcgctgatggtcagacggacctgcacaggtgttatcacctccagcgtagcgggtttagtgagatctttttcattatgcaactgcacgcctttcgcaaattgcgctgccgtatcgtcggccaccggcgactccagggtcaccagataggttttttcacagtgatggcgcggcgacgtaatgcggtgcgaccactgaccgtcatctgtcattaacaccagaccggtagtatcgatatccagacgtcctgcggcatgcagcttatacgccaccggctcatccaggaaatacagcaccgttggatgatcgggatcatcggttgaacaaacgtatccctgcggcttgttaagcataaaatagcgtggcccgtgttgctgcgctaagggattgccgtcatacgcaaccgcatgttctgggagcagtttgaaggccgcatttttaatgatgtcgccatcgacggtaacgcggttaccacgaatttcacgcccggcaatagcgcggctgacgccaagctgctgagcgataaatttatcaagtcgcatgtgtgtgatttagcctgtaataatacggaaatcgggcattctacccgaaaaaagggaattgctatccgctcagtatagcgggctaactatatccctcaagggaaatgattcatggcatactattcccggaaccgtttaacgtagtgagaccatgatttttacactccgcccctaccagcaagaagccgtagacgccacgctcagccactttcgccgccaccgtacgcccgccgtgattgttctgccgaccggcgcaggtaaaagcctggtgatcgccgaactggcgcgcgtcgcccgcggacgggtactggtgctggcgcatgtgaaagagctggtcgcgcagaaccacgccaaatattgcgcgctggggctggaagcggatattttcgccgccggactcaaacgtaaagagagtcagggcaaagtcgtgttcggcagcgtacagtcggtggcgcgtaatcttgacgccttccaggaggagttttcgctgttgattgtcgatgaatgccaccgcatcggtgacgatgaagacagtcagtatcagcaaatcctcactcacctgagtaaagttaatcctcacttacgtctgcttggactcaccgccacgccttttcgcctcggaaaaggctggatttatcaatttcattatcacggtatggtgcgcggcaacgacaacgctctgtttcgcgactgtatttatgaactgccgctgcgctatatgattaaacacggctatctgacgccgcctgagcggcttgatatgccagtggtccaatacgatttcagccgcctgcaggcccaaagcaatgggctgttcagcgaagccgacctgaaccgcgagctgaaaaagcagcagcggattacgccgcacatcatcagccagattatggaatttgcgcaaacgcgcaaaggcgtgatgattttcgccgccacggtcgaacatgcgaaagagattgtcggtctgcttccggcggacgacgcggcgctgattaccggcgatacgccagggcccgagcgcgacgcgctgattgataatttcaaggcgcagcgttttcgctatctggttaacgtctcggtactgaccaccggctttgacgccccacacgttgatctcatcgcgattctacgtcccacggagtcagttagtctttaccaacaaattgtcgggcgtggtctgcgccttgcgccgggaaagaccgattgcctgattcttgattacgcaggcaacccgcacgacctgtatgccccggaggtcggtagcccgaagggaaaaagcgataacgtccctgtccaggtattttgcccggcctgcggctttgccaacaccttctgggggaaaaccactgccgacggcacgctgattgaacactttggccgtcgctgccagggctggtttgaggatgacgacggccatcgcgagcagtgcgattttcgctttcgcttcaaaaactgcccgcagtgtaatgccgaaaacgatattgccgcccgacgctgccgggaatgtgacgccattctggtcgacccggacgatatgttaaaagcggcgctcaggctcaaggatgcgttagtcctgcgctgtagcggaatgacgatgcagcatgggcaggatgagaaaggcgaatggctgaaaatcacttactatgacgaggacggcgcggatgtcagtgagcgcttccgcttgcacacgcccgcccagcgtaccgctttcgaacagctatttattcgcccgcatacgcgcacgcccggcgttcctttacgctggatcacggcggcggatattgtcgcgcagcaggcgctgttgcggcatcccgattttgtggtcgcgcggatgaaaggccagtactggcaggtgcgtgaaaaagtgttcgactatgaaggccgcttccgccgggcgcacgaattacgtggttaattgtacttttcattgatgtaacggcgatttgagtatagaatcccgcccgcctttgcatacgcaaagcagatcacttacctgttgctgggtcgcctgtagcaggaattattaaagagagatttaaatgtttactatcaacgcagaagtacgtaaagagcagggtaagggtgcgagccgccgcctgcgcgccgctaacaagttcccggcaatcatctacggcggttctgaagccccgattgctatcgaactggaccacgaccaggtgatgaacatgcaagctaaagctgaattctacagcgaagttctgaccctcgttgttgacggtaaagaagtaaaagttaaagctcaggctgtacagcgtcacgcttacaaaccgaagctgactcacatcgacttcgttcgcgcgtaatcgcctggaagttgaagaaaaaccccgccccggcggggtttttttatgcgtttaattgaatttgacgacatgcagagcaacgagaacccactttgcttttctgctttcttacacctcgccacattcaattagcgcctcccctaatcgaggatctgtagtttccgccgcggtattcatacctttaagccgattgaataatgcccgttgacgaacgctggcactttccggtttccatggcaaaattcgtattggtatcgtttgcccatcattcaacgcatcaaataccttttcattggtcagtaagtcgccgcagctccatgtcttgctatcaaactgaaaatcaaataagacatggagttccagttcatctacacgcacttgacgctttgcattatcgatgcgtatttccaccttctctttatgcgtcaaagttgcatcaagattgagtccataccgtttcaactgccccttgtcgtaatagtaacgtatgctggaccaggttgatttaaaagcaaatccagtaatgaataaaccacttaacaagaacagcgggcatatgaacaagctcagtaaccagttggtgccataagtataaaacagtaccaacgagagaacggtgaacaccatgccgagcatcaacatcatcaaaaatgcgacaatgtgcgcatacaaaacctgccgaaataaactgaaattaacaggcggcctctgacgtattcctttactcactacggcgtccttttatgtcgtatgcctttatttcccgcccgacgtgcgtcgctgcaactgatcgcgcaaattcggcggcgtccctttgatagtcagggtatcggtcgccgggtcccagaaaatccgctcgcccagtagcatcgcatcaaagttaatcgttaacccgccgccgctgccggcatatttggttaactggcgtagcgtactgcgatctgccgggaagctctcttccagctcatagcctttttcggcggtaaattcgctgaagctgacttcactgacgccggaaagctctttagacagcgattccagctcaatttcttccccggcttgtaattgctcattgcagtagctgtacacctgctggcgcacgttctgacgttccgctttatccaactgcgcttctgcggtgaaatcatccactgcctgcaacaggccgcgattctgcgctttggcgttcaacccttcgctggcgccgaggaaatccataaagaagtcagcgaccttgcgccctacccgacctttgagaaacgtcagatagcgggtcgattgcggattagtttcccactcggtaagatcgatacgcgccacgatatccgcatggttgatatcaagataatgcgtcgggttaatgtccagattttcattgacccgcatactactcaggttgttcagtaccgtaaccagcagatactccaccgccaggtaacgataatggcagaacaatacaatgccgccgtccgcaaagggatatttcgccagttcgtcacgcaggcgtccggtcgccgcccggctaaaggcaagaaaatcttcttccccctgacgttgcaaccgcagcgcttgcgccagttcactctcttcattaaacaggccatacgccttattcttggcgctatagacccgatgcagttcagccaccatctcgacaacggtggttgtcggctccagcaatgaatcgcgcaagaccagctcaagattttgctcatcgcgcttgataagctggtgcagggcaatctggttgatatccagactcatgataaactctcctttaagaccgggcggtattcaaccaccgcctgccggaagacgcaagcaatcgccctgtcatttcaggcgttatccgtaacgcgaatgatttaggggataaaaatgcagaaaaaaaactgttgctacggtaatatgttgccctttcatgaacaaacagattttgatttatgccacaactctcccgctatagtgatgaacatgttgaacaactgctgagcgaactgctcagtgtactggaaaaacataaggcgccgaccgatctttccctgatggtgctgggaaatatggtcaccaaccttatcaacaccagcgttgcgccggctcaacgccaggcgattgcgaactcttttgcccgcgccttgcagtcttcgattagcgaagacaacgcgcactaaaaagccgactccggagaaacaagcgacaggtatggtaactcatcgtcagcgctaccgtgaaaaagtctcccagatggttagctgggggcactggttcgctctgttcaatatactgttggctacgttgctcggcagccgttacctgtttgtcgccgactggccgacaacgcttgcgggtcgcatatactcctacctgagcattgtcgggcactttagctttctggtgttcgccacctatttgcttattctttttccgctcacgtttatcgtgatgtcccagcggctgatgcggtttttatcagccattctggcgaccgcgggtatgacgttgttgcttatcgacagcgaagtctttacccgtttccacctgcatcttaatcccattgtctgggagctggtcatcaaccctgaccagaacgaaatggcgcgcgactggcagcttatgtttattagcgtgccggttatcttattgattgagatgctatttgcgacatggagttggcaaaagctgcgcagtctcacgcgccgccgccatttcgcaaggccgcttgcggcattctttttcgtctcctttatcgcatcgcatcttatctacatctgggcagacgctaatttttaccggccgattaccatgcagcgggcaaacctgccgctctcttatccgatgacggcgcgacgttttcttgaaaaacacggtctgctggatgcgcaggaatatcagcgccgtctggtagagcaaggcaatccggaagcggtctccgttcagtacccgctcagcaatttgcactatcgcgatatgggcaccggtcagaatgtgctgctcattaccgtagacggcctgaactattctcgctttgagaagcagatgccggagctggctacatttgccgagcaaaacatcgacttcacccgtcatatgagttcagggaataccactgataacggtattttcggcctgttctatggcatatcgccaggctatatggatggcgtgttatccaccagaacgcctgcggcgctcattaccgcgttgaatcagcaaggctaccaactgggactgttttcttcggatggcttcgccagcccgctttatcgtcaggcattactgtccgatttctcgatgccggcagcgcaaacgcagtctgatgcgcaaacggccagccagtggatagactggcttgggcgctacgcacaggaagataaccgctggttctcatggatatcgtttaacggtactaatattgatgacagtaaccagaaaaattttgttaagcgttacgccagtgccgccagcgacgtggatgcgcaaatcaatcgggttctgaacgcgctgcgagaggccggtaaattcgacaatactgtcgtgatcattaccgcaggacgcggcataccgttgacgccggaagaaaatcgcttcgactggtcgcaaggtcatctgcaagtaccgctggtgatccactggccggggacgcctgcgcagcgtattaatgtgcttaccgatcataccgatgtgatgaccacgttgatgcaacgcctgttacatgtcagcacgccagcgaacgaatattcacagggccaggacatctttaccgttccacgtcgtcataactgggtaacggcggcagacggcagtacgctggcaatcacgacgccgcaaatgaccctggtgctcaataataacggtcattatcagacctatgacttacacggcgagaagatcaaagatcagaagccgcagctcagtctgctgctgcaagtgctaacagaagagaaacgttttatcgctaactgattaattataaatcagttagcaccgtttccccttgcattcgcgttggaaagaggtagtattagcacccacaagtcggcacgtagcgcagcctggtagcgcaccgtcatggggtgtcgggggtcggaggttcaaatcctctcgtgccgaccaaaattcctcgaagaaccagcctgttacggctggtttttttatgcctgttttctgaacggggaagcaacggggaataatcggggaaaaaccccgacacaaaacatcgactttaccgtaaagtttcaactattcacatcaccgggcagtcatcaaactccgcgttcctggcatcattaatgatgtacgtgataactccaaatattgcgtgtgaagaattgtagccatcaccatcttctggcagcgcttcctttctcccgttctccagatttatcaggtggggctgagggtgagttcggtatcgcttgatcctgaattccccatctatcgcgcatatcagcagcgagccatcacaggctgaaagcgacgcgtccacaacaagtagcgccccctggattatcccttccctgaaatgtgaacgcgatgcccgcatgaaataagtcgctgcgggctggctgattagctgctgatcgagggagatccttgtttcaacgtaatcactggcaggtgaagggaagcccatggctatagtcctccgtttggattgaacagctgaaaggtaggtctccccttcctgcgttgatacatcgcggaatgttgtcacataccactcgatccattcgttagcctgcttcatcgtccagttccagttaaccttgctcagttgctggacaaaccgctgtgtggtgacggtcttccggccattaggttcctgctgtatcgaagcataccaggctatttcaatattgatggtttgcccggagcaaaagatatcattctgggagaattgactaagagggttcaccggatcttccccgatgctgatgttcgggttaaaccgatgatgacactaccggcgatcaatactgacgccagcaagcatgagaaggaacagataagccgtactgttcaggaaatgtttgaagaggctgaattctggttagtgagcgagtaaagtttttcaatatccgccatagttacgttttgatcgcgctgtggcggattttcattttcgtaaacgttcccttttcccattctcaaaatttacagggtgcgattgcgaatgtgtccggtaccgcttaatcctgaactcctctccatctatgcaaaccagcaatgagtcgtcgcgtggcgaaacggacgtatcaataaccagcaagatgcgctggtcagtgaccttctttgatgtagttgatgtagttgatgtaacaggtcaattttaggtgacgacttttataaaaaagtctatcatccattatcttaatttcgtcttgtgtggcaccttggaattataggtaaaaaatgatctacaagaaattcagactcgatataaatgggctaagagcttttgcattgataagtgttgtgctgtatcacttcggtgtaccttatgtgtcaggtggctttataggtgtagatgttttctttgtaatttctggttttcttatgactggaattgtccttgaacgcgtagaccacaaaggagtacttgatttttatattgcaagattcctaagaattgtaccagctctggtatttgcaattctcttgttgatgattttcggtttatttacactaagtacaaatgaatacgaagcacttagcaagaacgcaatatcgtctttacttttttattcaaataattattacgcaattcactctagttatttcgactcatcatcagagttcaactttttgcttcacacctggtcactatcagttgagtggcaattttatattttatatcctttattagtcattatagttaaaaaattacggtttcctgttggactctcattatctgtaattttagccatgtcacttgcaattacacttatgcgagtgactggaaccaaagaagatattttctatcttatccctaccagggcatgggaaatgctggctggcggccttgtatacatagcatctgtacgttacaaaatgccagaatggataaagcattgtgaggtttatgggatagtcctcattgttgttgctgttgttatactgcacagtaatggttactggccaagctattcagcactcgctcccgtgctgggtgcttcgatggttattctggctaacaaacagaactctttattcacatcaaacagaattgcacagtgggtgggtaagatttcttactcagtttatttatggcactggcctgtaattgtagcgatgaaacattatgatattgagttcagcgctataaatattttctttggtgtaattgtgtcttttgcgcttggggatatttcatacagaacaattgaaaacacgctcaggaaacgagttaagctacaatttaatattgtattattttcctctactctggctctatgcttgtttgtcatgttcacaaaaggtgttagttttagattttcagacaccctaaagcaagtcgttgagtatcgtatggacaactctccctggaggcctgatatttgcttcctcaatccagatcaagattattcagcattctcaaaatgtcaggataaaatgactgaaaagtcttttgttgtatggggtgactcgcatgccgcacatcttatgccagggctgaaatcggtatttggaaattcacttaacattacgcagagaactgcaagcttgtgcccaccaatcattgggcttcaaaaagatgacaggccgtattgcaaagacatcaatgatatggtagccaaggaaatttcagacaacaagcctactacggtattaatgtccgcgttgtggcctgtctatcctatgcgtgattatctgcctgagactattaaattcctgaaggataacaaagtaaaaaacatcatcattgttggcccgttcccggtttggaagaaaacgatgattgatactattgaggatatggggattaattccggaaggaccgttccatggagcatgacggatgaaacccgtaatctgagagataatgacaaatatcttagagagctggcgaaagagcattcccttacttatatttcaccacttgagactatgtgtacagaaagttattgcaaagcaataatagggaatagaattgcttaccctatacaatatgacaatgcgcacctaacaccagaaggctcagggtggtttattgaggaagtgaaaaagcagatttcaaaataaacagaggggcttgcccctctttttattttataaaactacaacaataatgcaaattattttatgtgtatagcttttctgatggggcatgctatattttgtgcaaccgatgtatcaaccgctttcagcgcatcgagataatccagccacagattgtactgcgccagttcgtcgcccgtcaggcgcccgagcgccgctttgcccggccaccgcctgctgttcatgtgctcgttggcctgatcgattctcttcttcttttcctgatttgcggcagaaattaaatcatcttgcgttggaggtggaatacaaacccaggcaatacgtccatttgatgaaccgagatacattccctttggtggagttttcatataatacttatcaacttcttcatcggtcagagcataaaaatcattcgaccacaacccactggccttataagctggaatgttctcctctgaaaaatatgtgtttgatgtcgaggaaaaacatattatgctcatgtcaataccccatgtaaattacagatatggaattatcgccaccggatggattaaatatacgaatagcaccgttgttctcaatcaaatatgttggggatatcgtaatatcaccttgtgcatcctgaggggtaagcgtggcagccttgaatacataaggaaatgttgttggtaatggaaaaacataccctgaagggctattcccgggaacaaagcaatttaaagcctgaaagattgcgccaccgggcagagaggtatagatcccggcagggttgtccctgagaacaaatgaagaaatgtccgggttctgattcgcgccgttgcccacgtcccgttgtgcggccgatttcaattgaacgtttcgagcacatgatttttatctatttattcagatattccggccagttaatatcaggtgcaacatctagcgccagtcggcgcagctttgttcggtattcacgtagcgcagtgagttcggacaattcagcagccgttatatcgccatcgtcctgagcttctacaagctgattgatttttgctgtgaccgacgtcatacgcctgtcgcgctctgccgtagctaaagcaacataatcaatctgaacaggggcaataacgccgttgctgtaggtaaaattcccaggctgaaaaccatcgggaatatcagtatcagcgaattccacaacagagcaattcagcggaaatagcttagtcgcatctttatccgcagcaataatcagccctgttttgtcatactggattttcagcgtatcgggctggaataacttctgtaacacataccagtcaacacctgattcatcctggataaactgaatactgcaattctctgataatttctgctgaacaagggttaattccgttgttttagtgaaatttttaaaatgcctcatttttatgctcccaccgtataccactggccattcactttaagctgtaacaggcgtcgttggatcctgtctggtgtatcgttcgagtctccattctcaacacctgtaatgacgtaacctaactggtctgcaaatccgggcgaacgatataagtttccatgctcaacggcaccgaatcgaattgactgaacatacccactcagcatgtcagttgtagcaaggaatacaccagacccatcatcatgaagcataaatggctttgttttgtcgttctggtacacaccaaccatggtgatgtactgacgcgctggcttagaagccacaaacgcgctcagccagcccggtccgctaccaccgccccatatatcaccgtatacatcgccatttttgttgaatatcgcacttccagcctgcaagttttcagcagctgcgataacaccgagtcgggtgctgatatatgcccggatagccaggtcttctgagttctgaaatccgataccattccatgacttaatgttcagattgttaccattaaaacctgcaccatcaacgtcacctttagccatcccaccagtgccatccccaaccgtaaccagggtatcgccacgcatatttggtgcagaaataccccccgtaaaggcgcccccctccagcatcgccacttgacgccatgaggtaatacccgttcctgttccgtgaccaaacaatacgttattgccactgactgcaagaacatccacaacagtggtcggacttaccacctcgctaagggtaataatttgccagaaacttacctggtctggcgcgtcgggggcctgatgcgcacgcataaactgacagcctgtagccgcacgcgcgccgattgatgttcggtcaattgcgtcactgacaaacgttcccgcgaggaatcgcccgtcacctttaaaaagaacgtctactaaaccaacgttctggagaaacagcggcttattcgggatgtccgcgccattctgatttttttcaagacgggttttaacctgttcatagatcaacctgccaatggcggcgtgaagctgcgtatgttcgcctttactgagtggtatgccggcggcttcaataacagtacagacctcttcctggactgcatcccacatatcactgttgagatccgttgcgcggcggcccgtggcgggatcaccattcgtaaatccgtttttcccctgaccaaatttatctttttgcgcagtgggcgtatcaattctgtgcattctcttttccttccggataagcaaaaacaacaaccgtatgtgacggacaaagcttatcaatcacacattcagcaacagtatcgccccacgttctgatcgcagaatcgcaggtgcttgtacaggtctgccatccagcagacgggaaaaacgggtaatctcacgaatcaccacaccatcctcgtcctggtaccattcctctccgtcgcgggcgacgcgaaatgcaaaagaggactggttgatatccccgcgctgcattggtgccaacaccagatcacggattgtctgagtttctggcgcggtgatgtcataacgcagcccccgctcatcaaccgtcagtgccagcgtgcccgcacttctgcgacccaggataaaattggggtcatggttgaacaacgcccgtacatcgtcattcagcacttcatcaaacgcaccgggccggatgatttcgcgaaacgaaccgaaaatcagttcagaacgactgtcaaagaccgaaccatacccgatgatccggctgggctcgctgtcgtgcgtttctgcgcgcacctcgccgctgtaacagcgaatttcacgttcactcatcttgagtgttctcctagattgtggttttggctggccgggaggcgttgacgctgaccagcatttcatcaaggccgtctttcggattcatgtcctcaaacgcgcgtgcttcgttgcggctcatccatccgacatactcaagagcagatgcaaaggtcagtgtcagagcgccacagagcaaaatctcgagcatttttcgcttccagccgccaccactgccaaaataggcgatgcgcaaaccagccataacaatcgacataatgactgcgcccagcggtgtgtctccacgccaccagctctgtaacaattcaagtaaatcaggccaggtatttgggttatgaggcatttgtagttatctctcacctcgctgatacagcaggtgcaaattgagggaataccacgtaccgcaaatcagaagcggaaacgtaaaagaagccgagccaatcgataactgcgggataggccaggcccaacgaatcccaggcccagaaacgacaaaacccgctcgacggcgggtttaagctgcgtggcaaagtaaccactcttagcagattacaagaatttttgcggaccgcgttaatgatttttaatcccaaagtcgtattatgcgttttttactgtaggagttaacaggcttatattatgttagaaacactatcattcactgaacgtgacgagttccaacgaagaaacatcgctgaaaatatcatcaaattgctaaaaccagaggcagacatttcaccactggtaatagacggtgcatgggggacagggaaatcagaatttagtatcaaactgaagaatctcattatcgagcaagaaactgagtctaaagttgtctatgttgatgcctttaaaggggatcatgcagaatctccattacttctaataacatcagctattgcgagcattttgccggaggaggaaaaacaaaacttcattaagagatctcttcctgcaattcgatttggtttaaaaactgtactaaaagctggtgcaggttggtttttacgacaggaggctagtgaagttgccgaagaattccaagatgcgatgaagaaagcaagcaatgcagcaatagatgggactattgaaaatatacttgaagaccacatggaatcagagaaaaacataaactctctaaaatcttgcattgaagatatatcaaacaagcaaaagatagtgataattattgatgaattagaccgatgtaagccaagtttttcaacaaatatcattgaaacaataaaacacatctttgatatcaataacgtattttttattttagttacaaacactgaacaactaaaagcatctataaatcatatttatggttatagcattaactcacaaaagtatcttgacaagtttataaaatataccattactcttccagacacatgcttaataaatgggcataacgtatgtaaaacctcggttatatattgggatcaccttgtaggtgaaactacattactaaataaaatcaacagcttagttggtagctttatttgtgatttaattcaacgaaccaacttatccttacgtgaaacacaaaccttttcacgcaatcttaacattttccgactgttaaacgacaatgagtgcaaaagcaatgatccttttataaatatgatcgttgtcgtagctgtcttcatacattgttttggtgacaaggaaaaactaaaacaagaaattaccgctgaatctatatcttatttagcagacctgcttaacataaaagaaataccttattcttatgagagaagatcgcaaatccctgaaatatcaattatattcttcggaataattaaagacagcattactcttaatgagcgatttgcccctaaaagtgatgaggaacttaaaaagttcacaaatgtttatactgattatgaacacctaaaattttggagcactactcccagagagttaatgataaaatatattaatcaaatgtcattcatccagtaaataatacgcccctgcatggggcgtattattaaacgtccatatctaatgttagatccagcattgaaaggcagccatcaataaatccttcggctaactgtatttctatacgtaccaatttctcatccttcccacgcacctttgcaatcttacgcttggatattctgtataaataatgtgccacaagaagcgaatgctcatcaggccttttttgctttaaacgagcaagacacccctcaacaattaatgcgtcattatcagaacaagccacacgtgtcttgcaggtatagggaagaagccctttaaacccagcagctataggcgaatagtccactcctgagctatcactcgccgcccatgccccccaacgctcaagaaccatctgaatatcacgcatcaactttctccaccaaatcaggccagcacgccaattgccagcgcgcgatcgataaaacgaaatatcaactccagttgagagccgtatttctcttcgaatgccacggtgtccgcatgtaactcattgtgatgcgttctgcacaacggcagcacaaagaggtcatgcgcctttgttcccatccctccctgaccgtagcctatcaggtggtgcggatcatccgcctgcttcccgcagcaggtgcacggctgggatttaacccagcgggtatatctctcattgacccatcgacggcgtttcggacgtaacatgaagctttccggcgattccggatcaaccctgagcgccagtacctttttcgccttatcctgtacaatgctggtggccggcaccgagggaacaatttcactttcacgggtagctgactggacaattgccttcggcattcttaatgcttttctcgcagcgctctccggtaagacttctgccaggtcattgcgtaccatccaccagcacagttccgggagagtaactgcgtgcatatcgtcaaaacccagatcacgacaaacaaccgataaaacccattttgtcgtgttctccacagctattgatttcagccgttccgtaaactgttcgcgcagcaggttatcgcagtgccagcacagtcggattgcccccggggcgtggcgcatggttgtcatctgttcgctgtgccagtctgaatgcggccactgacagccattcccccggagtagccagctttccagactatcgagaccaccagcacgatagataaccgactcattacggaacacatcacgaacagcaggatcatccgccagcggctgtgataccgccgggaccgcgccgcaggcgaaagatgaatattgttccggctctggttcaagcagaacacgcccctgcataaacaggggcatcagttccgctcccggcctgaacaatacaacgcccatacgaggagcaatttcaggggtcagtaacgctctcacgatcacctcaatgaacggtatcgagcagcttcagcagctcagggaatttggattcgaagaaatgcggttgcgtctcgcgagggtttgccgggctggtgatgtttttgccgaacatgcagccttttgccgtcagcgaccagaattttttaatgccgttaatcgcggagcgactgtaacgctcacgatgttcaacaacacccagctttgctaactgctgatacgcctgattagccgtcatccggatatttcacctgtacatcatccgtactgtctgatgttgttcgtccgggaatatctttgtcgcaccgcacctcattcacctggtgcatcagttacgacgccactgaacgttcagatagctccccagcatctcctccacaagaggtcgcaggccatccaaaaatgtctttttcgcgctctccatcgctcttgctccgatagtgcgctctgcatcggtattaccgaccagcccagacggtctcagctctgtgtcagacagcatccggtacgtttcctcataatccgatatttgcttttcacgaagcgcgttaacgcgttccggcgctttgcgctccagcactctgtgtaacggcccccactgcagtatccactccctgaactcgcttttttcagcggctttcacctgaagctccgcgtcctgaaggtctgtaaccgtcacgccggatacgtcaaagaaacgcatttctgacgtcacgctggtcagcccgagtgatttcttcagcttattctgatacgccagccagacctcaatttcatcaacgagagccagcgttctgaccttttcccgggcaatctgttccagttttcccagacggaacatctcacgccccgtggcaaccagcgccgcgagatcgttatcgtattgccctttttctgcattatgtaccagctgtacgttcttcatctggtgcaaaaaaaatgtgacccggtcctcgcagcttgaggttgcctctgttgccatagcaaaggtgtttgctcttaacgcctcatcttcagccagttgtgccagccaggacgatatctgtgccttaaaccccgcgtcctttatgaagttttccgtctcactcagtctgtccaggaagaggctgaatgcgtcggcgttatcttcctgtccgaacatatgccatctgtctgcaggagccggttccccctcccgggcaggcaccagccagtcagcggccgccaggtgcagtgcccgagtttcccgggggcggaggctcccgccatatcgaatcgtattatggggcctgaatagccaggcgcgctggtgatctcccgcagcgcctgcaaagtacgttcagacagtgggttcccttccagatttacggttgtctctgaagacagatgaatgagactttccggcaggcgggtcagctggttacgatagaccgacagcgacagtagtcctgacggcagcatcggcaggctggtcagccggttaccagataccatcagctccttcagttctgacggcagcaccggcagactggtcagccggttaccagatacaatcagctccttcagtcctgacggcaacgccggcaggctggtcagccgattattataggcccacagcttatataattctgacggcagcgtcggcaggctggccagttggttatcagataccgacagctcctgtagccctgacggcaacatcggcaggctggtcagctggttattataggcccacagcttacataattctgacggcagcgccggcaggctggccagttggttatcagataccgacagctcctgtagccctggcggcaacaccggcaggctggtcagttgattaccaaagatccacagcttacatagtcctgacggcagcgccggcaggtgggtcagcgggttactaaagatcgacagttccagtagtcctggcggcagcaccggcaggctagtcagctggttaccagagacctccagcgtccgcagttctggcggcagcgccggcaggctggtcagattattatcaggaataaccagtgtggtaatatgcgcgggtaaacagtctggcaaggtggtaagacctgattctcccacgttaagcactgcattgccattattcaggcaggcacgcattttctgtaccactgctgcacggccgcgtgactcttctgcgggtgcagcccttctccacgctgaccagacagcatcatactctgctggcgtctgtggagccgttgtggcagggaggaaggatgtcctgaatgtcccggatgccccttccgcgtgtcctgtgccctcctcaccctgtgctgtgtccagggtgaggcgatgtgtttcactgtacccctggcaatttacggtatagttcccggcatcatcaagggtgactgacaatatctcctgactgtcttcatccagaatacagaagtaattttccccgtgctggccggaatgaatgctttcctcccatccggcatacgcgagcgtcctgagcagttcaaatctgttgatcacatcctcccgcgtcgttccggccggcgggtgacaaatcgtccagatgcactccagcgcttcagtctggtgcgttgagcaaaaaaattccttcattttttcccaggaactcatttcaggggggtatcagaccaggcaatacgataaatgcggcgattactgatggtggcgggaagacatccgcttccaatatgaaagggcataacaaaaaacctttataaatttacatatagtatctgtccggcagacatcatctcttcctggtcttaatttcacaataaggttatcggcggattcatggtcgtcctgacatggcgggcttcagaaggtgcagaagaaaaatccgttatgatgaccggatggcgggactgtcattttacagctaaagtgtcgattttttcagggtcgctttccacgatgaccagatcatccggtatcaacgcccgggcgttcaattttcgattctgcctgcctgcgcagctcttccggcgaataaaccctttgaacgactttaccgtctttaaactgccagcagcatgaatatcagcgcgacggttttcatccgtatcaggcaactctgcaacgctctggccagcaggccacagcccggaaacatcacgcgtaatacacgtaataacatcgttatcgtcgtaggtaattttcagcgtgtctgctgaaaataattgctggcacccataccagtcctgaccatcctctgatttaagatacgccgcatcggcgaataatgtgtcatctggttccggtgcatacggaatgaaatttttaatatttaaaaactgtttgttctttttattttttttccgctgtcataattattccttcttatacacttggggctgtcacccacgtatcaccaaccagatactgaatgggacgttgtcacccgaatagtcatcgcgccacgcactcccattacctcaatcactgcgccagcgagacagatattaccgcagccagtatccgtgatgattttgttataagcgtaagaccaagagccacgacacatccagtaagggtgattgaatgcgccctgagactccagccagacgataaactccgccgtcgtccacggattatcatcacagccgataataactgcgccatcaaacgctcgcgcggcaccgatacgacgcacaaacaaatccttgtccggaatatcgccgccattctgtgatttttgtaatgcatcggcggcacgacttatggtttctcgcaaaccaacgtattcgataagaccgtcaacactttttcctgacagcgccgtcagggtttcgtccagcggctgcttgcccgccagtttattcagtaccgtggtggcaaagttcggatcatttcccaacgcgtcagccagttcctgcagggtgtccagtggctccagtacggaaccaaccagcgcggcaatcagtttgcggacaaactccgcgtttgttgtctgaagccctttagcatcgcctggcggcgtcggtgtggtcggcgttccagtgaatgccgggctgtccagcggcgctttggtccgtacctcacccataacggtttttaccgcctttggtgtggccgccagcgcttcgctgtcactgtccgtggcactgcttaatttaacgataccttttttcgtcaggcttgcatcttccagggaaatcacgtctgcgatatcctcggcccgtttcgcggcctcttcggctcaggttgccaattctccggctgcagctctgctttgcgctgccagtgatgcgctggtatcagatgcggcggcgtgggtggatgcctccgatgctgatgactaggcggctgccgccgttctggctgtgtcagccgacgccgcgctggctgatgcctccccggcttttgtggtcgccgtacctgcgctgctctccgcagatgctgcggatgaagctgccgaccaaaattccccttgaaaaccagcctgtcagggctggtttttttatgcctacaattaaaaagttagctgatgccagagacgttattttgcatgaactgattttgcatgaactgattggacatctttcctgtgcagtggtcacagtaaagtcaatgcaggcaactaacgtaaaccatgtttgtactaaaacagaaaaagcgcatctacaccctatactggaaaaaatgtttgcagtggcaggtaaatgagtaagcaatctgtcgcagcaataataaaacgttctggtaaggtaaacggcctaccacgcctttgtcgctaacaattagcctccctgtcgccatagggtcgataacgatcggctattcacaacacgttttgtagacaacgtacggtgattaattactccttcagccagcaactcgctaattgttattcaacttcagaaattataactaattgaagcacctacaaaattatgccctgaatttttatccgtaagtgatccattcgagaaatgccggatataagcttctgtagaaaaagccccaaagttccagccaagaaacgctttttctccaaaggtaaatgcagaattgacacgcatatcatctcgcgacttagattttatataagcccccagaccaataccggtatagataccagcgaaatgaaccagcgccacatccttcgagatacccaatacgccctggttatatttattacagggaacgctgccagaatgtttactgcaatcatcgctacccttagccttaaatcctcctaactccagattatttcttgcctgtaaaaagaaaaaatcgctgggttcactgtatgtcagaaaagccgtatataagtgctcaacccctcctcttcttatactttctcccgcagcaaaagagatctgatgcttgttgcccttgccaaaaaaaacattatcattagcagaacatgcgaatgcacaaggtaataatagatatataaatattctcttcatatacactccaccaccatttcaatgtcaatagttatttttaaccggctaacatatttaaaattttctacgccacgcttacgctcacagaaacggctgatatagcatccacactacgttctccccttgagtcgccccaacgggtgctcaaaacgccgcgagtgttgttcaggcacatccaggataagttataagtgaatgacactcatttctgaccacattttcatttatgataagaatatcgtcagaatctctttatcgcataaaaatacctctgctattgacttaatatttaatttaacagatgtcgcggtttattcgttctgctcagatgtatttcattgacattaataaaaccataaataaattcagttaaaataatttgttaataatgacaagctttagacgctatgacttttaataagaaatttcctgccagtaaagatagtctggacttacgggtgcaagggcgcagcaacatatgccacacttctgttatgtcacattgtccgaaaaaagcgtccagaccagtattcaacttcagggagtattctgttttctctcacaacgggttgttttatcctttctatcgttcagctaattactcgcctgtcacaggttttactacttacccatgcactaattagggtaaaatttacgcgcttgacaatgtggcaaatctggacgatttccgcgctgaaaacaataatcattctaataaaactcaggagatacagcatgcctgaagtaacaccttttcaggtgcttattgtggacgaccatccacttatgcggcgaggtattcgtcaattactggaactggacccggcttttcatgtcgttgccgaagcgggtgacggggcgagtgcgatcgatctggcgaatcgcattgagcccgatctgatcctgctggatctgaatatgaaaggtctgagcgggttagataccctgaacgcgctacgccgggatggtgtgacggcgcaaattattattcttaccgtctcggattccgccagcgacatctacgcgctgatcgacgccggcgccgacggttatctgctcaaagatagcgatccggaagtgctgctggaggccattcgcaaaggcgctaacggcggtaaagtctttagcgatcgggtcaatgaatatctgcgtgagcgcgaacggtttggcgcgcaggaagatccctttagtatcctgaccgaacgagagttagatgtcttgcatgagctggcgcaggggctttctaacaaacaaattgcgtcagtactgaatatttctgagcagacggttaaggtgcacattcgtaatctacttcgcaagctaaacgtgcgctcgcgcgtcgcggcgaccattctatttttacaaacacgcggaatgcagtaacaagccaggcccggtggcgccgcgccaccgggccgtcagggtcttatttctcctgcgccagccggatactgcgctctatcaccgcccgccgggcgtcacccgccggcagtaacttcagcatcatctcccaggccgccaccgcctcgccaaagcgctgctgctcaaaggcgctgaacgcatacaggcttaacacccggatatccgtgtggtcgcggctcaccagctgacgcagcagctccccgccgcggcggttatcctccgggtcggacgagcgcgtcagcgcctccgcgtagcccagcgccgcatcgcggtttttcgggtccagacggtaagcgtttgcataggccccggtggcggtaccggcattacccagtaccataccggtgcgccccagcatgagccagccctcaacattgccggcatcattctgcaggcgggtgcgcagccccagcgccagccgcgccatctcctcctcattcagcggctgcgcctgcgggtccagcgcccgcgccagcagtcccggcgtctgcgccgttgcctgctgccaggccctcacctgcggatagctgccggtctgtgagtaactgatggcggccacgaccagcgccataaccacgcccggcacgtaagcaccccacccggcgcgcggtcccgccgcaggaatggcgtcggccaggacgtcctgtctgatacgcacccgccggcgcgtgcgggcgacgattatccacccgcccgccacgatggtggccagcggcagcacccacagcagcaccgtcagcggggtcagcggcgggtcgtaggtgacaaagttgccgtagcgcgccaccatgtaatcgatgatttcctggcggctcttcccctcctgcatcaggtcatacaccctgcggcgcatgtcggtggctatcatcgcgttcgagtccgcaatgctgttgttctggcatttcgggcagcgcagctgctccgtgagctggcggaactgctgctcctgcgcttcatctttaaacggcatcacgtcggtggtcgcccgcgctgacccggcgataaccagcaccagcatcagcatcaccatgcccggtaacagtctcattgcgccgcctcccggctgtatctgtcccacagcggtttcagttcactttcccatacccgggcattcaaatcgcccgcatggcggtagcggataatccccctgccgtcgatgaggaaggtttccggcgcgccgtacacgcccaggtccagccccagcatcccgtcgctgtccgataaactcagcgcatacgggttgcccagttcctttaaccaggccaccgccttcgcccggtcgtccttatagttcagccccaccacccggataccctgcgcagaaagctggttcaggtactgatgctcggcgcggcaggtcgggcaccaggtggcccagacgttaagcagcaccggtttcccctgcgtcagcacctccgcctgatagtactgacccggcgtctccagtgattccaggcggaacgccggcaccggctttccggtcagcgccgattcgagattcgtcgggtcatccccctgcgcgttgcgcgccagctgccacagcagcgccgcggcaatcagcagaaaaatcagcagcggtaataacagtacgttgcgtttcatccggcctccggcaatggtttacggcggcggtagcgcgggtccgccaggcacagcagcccgcccagcgccatcagcagtcccccggcccatatccagcggacaaacggtttgtagtacaggcgcacggcccacgcgccgttgtccagctcctccccgagcgcggcgtacaggtcgcgggtcagcccgccgtcaatcgccgcctcggtcatcaccatccggctggtgttgtagagccgtttctccgcgtgcagcaccgcctccggctcgccgtggcgcgtcaccccgatgagggccaccccgccgcggtagttgggcccggtgatgtcccgcacctcccggaaggtgaagcggtagtcgtgaatggtcacgctgtcgcccgcccgcatccgcacgtcacgctccacgctgtaattctggctgaaggcgatgccggtaatcgtcaccgccagcccgaggtgcgccgccaccattccccagtagctgagagaggttttcgtgccgcgggacacgcgctgtacggcttcggccaccgccagcaccgcaatccagcaggccatcgccatccccaccgccgtcatggcgatgattttatcttccagcagccatggcaaaagtaccgacagcaccagggtggagaccagggcggtgagcagcagcgtcctgatgttacgcggccggtcccggccccagcgcaccagcggccccacccccagcagcagggcaaaggggaccatcagccaggtgaacatggtgttaaagaacggctcccccaccgaaatgctgcccagccccagctgtttgtgcaccagcggcagcagggtgcccagcagcaccaccagcatggcggccatcagcaggacgttgttgccgagcagcagcgactcgcgcgaccacagcgcgttgttcacccgcgaacgcaccctgtgcccgcgcacggcgaacagcagcagcgagccgccggtgaccagcaccataaaggcgaggataaacatcccgcgcgccgggtcggaggcgaaggcgtgcaccgacaccagcaccccggagcgcaccaggaaggtgcccagcaggcacagcgagaaggcgcagatggacagcagcagcgtccacgccttaaagccggcgcgctgttcggtgaccgccagcgagtgcagcagggcggtgcccgccagccacggcataaaggaggcgttctccaccgggtcccagaaccaccagccgccccagcccagctcgtagtaggcccacgccgagccgagcacgatgcccagcgtcaggaacacccacgccgccagcgtccacgggcgggcaaaacgggtgaacgcgctgtccagacgcccgctcagcagcgcggcgatggcgaaggcgaaggccaccgagaagccgacatagcccatgtacagcagcggcgggtggaaaatcagccccgggtcctgcagcagcgggttcaggtcgcgcccctccaccggaaaggccggcagcgtgcgggcgaacgggccggaggtgaacaggatgaacgccagaaaaccggcgcagaccatccccatcaccgccagcacccgggcgacgatatccgccggcacctgccggctgaacaccgccaccgccagggtccagccgctcatcagcagcacccacagcagcagcgagccctcgtgcgccccccaggtggcggccacccggtaccacaccggcagctgcgtgttcgagttgccggcgacataggccacggtgaagtcgttaaccacaaaggcgtgcaccagcacgaaaaacgcgcccgccacgcagataaacagcagccaggcgaacaccccggccgacgccatcatccgcgcgtcaccgcgcgccacgccccacagcgggtaaacggacagcagcagcgccacgccgagcgccaggcacagcagcgcgtggccgtattcaggcatcatgatgaggtgtccttatcagcgcgttgcgggcggcggtggttttcctgcatcgccttttccacttccggcggggtgtagttctcgtcatgtttggccagcacctcgtgcgccaggacgtggttgcccttctccagggtgccctgcaccaccaccccctgcccctcgcggaacaggtccggcagtatcccctcatagctcaccgtcaccgacccttcggcgtcgtagagactgaagttcaccttcagcgagtccgggtcgcgcctgacactgccgggcatcaccatcccgccgacgcgcaggcgctggcccgccgccggcagctgctgcgtctcgcgcttgccgtagaggatttcgccgggggtatagaacaggtcgatattcgcgcgcagcgcgtacaggaccagggcggtggtcagccccaggcccgccagcaccgcgcagaccacccatagccggtttttacgtcgcaggttcacgcggcctcctgttgcgcctgtgcggcacgcatccgcgcctcgcgcgcccgctgctgcgccacgccgcgcagaatggcccggcgctgcagcaccgtgtgcagcgccagcagcgccagcggcgccacggtcatcgccaccgccagccagacaaaaaaggcgtacccgcccatggcgaaaaaatcgctccacgatgaaaatgccggactcaccggtgcccccttttcagtatcagttcgctcacccacgggcggcgtttttccatcagtaaaatcaggttgcgcatccgcatcagcgaaagcgtcataaagagcagcaggtagccggcgatggcccagcgcagcggcgagcgcatcgccgggtcgatactctgctgcatccgcgtcgagccctggtgcagggtgttccaccactcgacggaatagtggataaccggcaggttcaccacgccgaccagcaccagaatgcccgccgcgcgcccggccattttacggtcgtcaaaggcgtgccacagggcgatgaccccggcgtagagaaacagcagcaccagctccgaggtcaggcgcgcgtcccacacccaccaggtgccccacatcggtttgccccacgccgcgccggtgaccagcgcgatgaaggtgtacaccgcccccaccggcgccatcgccgcgacggcaaggctggccattttcatctgccagaccagcccggtgaacgccgccaccgccatcgccgcatagatacccatcgaccagatggccgccgggacatgcaggtacataatgcggtagccctccccctgctggtagtccgccggggcgaaaccaaagccccggacccagcccgtggccagcacaatgatgccggccgccgccagccacggcacgagcctgccgcaaatctgatacagccggggcggcgccgccagctgatgaagggttttccacatagtcgtcacctgacctcctgaaaccagtaaaatgtccgtcgcgccggggcgctactgcacgctgaggcgcagcgccgccgcggtggcgaacgggcttaacgtcgcgctgcccgccagcagcgctcccagcaccgccagatagccgtcagcgggtaaatgcatcgatgccgcgtccatcgccgcggcggcgaaaatcagcaccgggacactcagcggcagcaccagaatgcccagcaggacgccgccgcgccgcagcccggccgtcagcgcaacgcccggcgcggcgagaaaccccagcgccggcgtgccgagcagcagcgtcagcgccatgattttccagccgtacacgtccatccccagcagcagcgccaccagcggggagagcataatcagcggcaggccggtcaccgcccagtgggccagcaccttcgccagcaccaccgccggcagcggcaccggcagcagcatcagctgctccaggctgccgtcctgcaggtcgtcgcgaaacagccgctccagcgccagcagcgaggccagcagcgccgccacctggatgatgcccggcgcgatacgcgccagcagctgcggctgcggcccgacgcttaacggaaacagggtgatgaccatcaggaagaaccacagcgggccggcgatgtccgcgccgtggcggaacgccacgcgcagttcgagacagaagacacgccacatcacagcccggcccccccgccggtcagcgccaggcggcggacggtgtccgcggcccccggcagcggctggtgggtggtgagaatgaccatcccgccctgcgccgtgtgcgccgccatccgccgggtgaggcgcgccacgccgttaacgtcaatggcggtgaacggttcgtcgagcacccacagcgcggcgcgggtcagccacaggcgggccagcgccacccggcgctgctgcccggccgagagctgagcgaccggcacgtcctcaaatcccgccagcccggcctgcgccagcgcctccgggagacgcgcgccgtcgccggggtggaagaagtgcaggttctcccgcgccgtcaggcgggttttgatccccggctggtgccctatccacagcagactgcgatggaagctgtcgcgcacgcggcgcaggggttcgccctgccagtacacctccccgccgtccgggcgcgccagcccggtcagcaggcgcagcagggtggtttttccggcgccgttgccgccggtgacctgcacccactccccggcctccacggtgaacgacagcccgcgaaacagcgtcctctcgtcccgctcgcagtacagatctctggcttcaagcattcccactcatcaacgtcctgtcagaaacctggtttaacatcacgcatatccggcagtttatgcgcgatccctttgtggcaatcgatacaggtctgtccatcttttaccgcctgatcgtgcattttcgccgcgacgcctttttgcgcggtcagatccataaagtcgaaattgtggcagttacggcattcctgcgagttgttgtctttcatgcgccgccactcattttgtgccattgtcaggcgatgagcttcaaatttctgcggtgtatctatcagcccaaataccttcgcatacagctctttactggctttgatcttacggatcatcttcggcccccactcatgcggcacatggcagtcaggacaggtggcacgaacgccgctacggttgttgtagtggacggtttccatatactcctcatacaccgtgttgcgcatttcatggcagctaatacaaaactcttcggtgttagccttttccattccggtattgaagccgccccagaagatgatgccgccgataaaaccgattaacagcagcgtccccaacgccaggcggctggggctgcgccaccatcgccagacgcgctttatccagccgggtttacggttagaattttccataatgacctcttatttcccgtaaccttgcgagggggtaaaggtattgtcgataatcggcgcggtatcagactgcggtacgtggcactgcaggcagaaataacgacgcggcgcgacgttgcccgacactttaccgtcgctgtccataaagtgcgtcggactgatacgcggcgcgcccgtcgtacgataactttccacgccgtggcattgcagacagcggttggtattggtcgtcacctggtagccctcgacgctgtgcgggatcatcggcggctggttgacgtaatttagcggcatacgttcctgctctttcggcatacgaatcgccccttcctgcgtcccggatacttccggcgactggctcagatccactccgtttgccgcccaaaccgcaccacttaccaccagggcaagcgtggccatccattgacacagcgctttcatcaggtcatggcttttcattgtttcgctcccgaactccatcgcatttacacttcatccttcgagctgcctctttgttggctgcgctcgaaaatcccagtcacatcgttatctatgctcccggggatttcctcgcttaccgccgcgatgcatcccgaatgatgttgcgtatcgttattgtaaaaacatcctcagaacagacatccacgcagcgaccgcaggtcatgcagtcgcggtgagtgacctgcgccgggctttgctcatccagcaccggcgcacgtagcacatgcggttccgggcaaacatgaaaacaatccatacagcgattacatttctcacgttttttggccgtcacggtcactacgcctttactgcctagcacgccatacagcgcgcccatcgggcaaatatgaccgcaccaaccgtgctcaacgactaataaatcaaataaaaacaaagcaataatcaacaacgcgccgctactaaatcccataatcagactacgacctaacagcgacacgggattaatccattcccacagcagcgtgccggtcaacgccgaaccgattaacaccaccaccagaaggacgtaccgtatatggcgtggaatcgtcgcagactggttcaggtcaaatttcctgcgcatccagttagccaaatcggtaacggggtttagcgggcaaacccaactgcaaaataatcgctttcccgccagcgcatacagcacagcgataatcactgctcccgtcagcgccacggtagcgggaagatgtccactggcgagactttccagggtaatcagcggatcggtcaacgggagggtatcgaacagcaaactactgctgtagttgccatgcaaaacccaaaagcccagccacgggccgctgagaaacatccccagcaccataaactggctgatacggcgtaacaccagccaacggtggctacgccaccagccttttttcgcccgcgcttctcgcccggcgtcgcgtttacgatttgccatctttcccctccagccagccgaagcggtaatggtgtcctaactcccctttcgccaatgacaacggcaacacttttatcgctggttgctccagtacgcagactttttcgcatttgccgcagccggtacaggcgtcgctgtgtacggtgggcagaaagcgcgcatgtttgccggtgcgcatgttgcgatccagctccagcgtgatggcctcatcgattttcgggcattcgcggtaacaaacgtcgcagcgcagcccctgaaagttgaggcagttttcctgatccagcagcaccgccagccccatgcgcgagtcatcaatggaggcgatatctttattcagcgccccgctggggcagactttggcgcacggaatgtcttcacacatttcgcaggggatgtcgcgagcgacgaaatagggcgtgcctgccgatagcccggaggccagcgtcgccagttttagcgtgtcgtatggacacgcctgaacgcactgcccgcagcgcacacaggcgctggcgaagacattttcattcagcgcgccaggcggacgcagccgcacgcccgatgcgcgcgcggtttgctgttgcaagcccagcgccacgccaaccgccgccagcccgcccgcagtgcgcacaacatcacgcaggaagcggcggcggccattttggggtttcgctgtacgggacataacgcgttacaccttcgccagcttaacggcgcacttcttgaagtccgtctctttagagagcgggtccgtcgcatccagcgtcaggttgttcactagctgagcggcatcgaagaacggcatatacaccagtccctgcggcggacggttacgtccacgcgtttcgacaatcgaaatcacttcgccgcggcgggacgacactttaaccttatccccacgacgcagatcgcgcgctttcgcatccagcgggtgaataaagaccaccgcttccgggaaggcgcgatgcaattcaggcacgcggcgcgtcatactgccggtatgccagtgttccagcacgcgaccggtggaaagccacagatcgtactcgttgtccggcgactccgccgcgggttcaaatggcagcgcgaagatcaccgctttgccatccggtttaccgtagaatttgtacccttcccccgcttttacatacgggtcgttgccttcgctgtaacgccattgcgtctctttgccttccacgaccggccagcgcagaccgcgcgcgttgtggtaatcgtcgaacggcgccagatcgtgcccgtggccacgtccaaaccaggcgtattcttcaaacagccctttttgcagatagaagcccaggtcacgagactcatcgtttaactgatcctctttcagctcgctcagcgggaatttgctgaccgccggcgtggcgaacagaacgtcatacagcgttttgccgcgcagctccggcttctgagccaacaacgcctccggccagacctcctcggttttaaaacgacgggagaactgcaccagttgccagaggtcggatttagcttcgcccggcgctttaatttgctgacgccagaactgcgtgcggcgttcggcgttgccgtaagcgccttctttctcaacccacatggcggtcggcaggatcagatccgcagacagcgcgctcaccgtcgggtaaggatcggaaacaatgataaagttacgcggatcgcgccagcccggcatccgatcttcattgatgttcggcccggcctgcatattgttattacacattacccagtagacgttcagcttgccgtctttcaacgcgcgatcctgcgccaccgcgtgtaaacccacttttgccggaatagtgccagcggggatctgccagtgtttttcgcagatatcacggtgtttttcgttcgtcacgaccatgtctgcgggtagacggtgtgagaaggttcccacttcacgcgccgtaccgcaggcggaaggctggcctgtcagcgagaaaggaccgcagccaggctgggagatttttccggtcagcagatggaggttgtaaaccaggttattcgcccacacgccgcgggtatgctggttaaaacccatcgtccagtaagagatcacgcgcttattcggatcggcgtagagctgtgccaactgttccagttgatctttcggcacgccggtcatttcagcggtcttgtccagcgtatattctgccacgaaggctttatactcgtcgaagctcatcggctcggaagcgtcggagcccggattcttcgccgctttttccagcgggtgcgtcgggcgtaagccgtagccgatatccgtcgcccctttacgcaggttcacatgctttgtgaagaaatcctgatttaccgcgttgttctgaataatgtaattcgcgatatagttaaggatcaccagatcgctttgcggggtaaagacaataccgttgtccgccagttcaaagctgcggtgctggaaggtggagaggacggcaaccttcacgttcgggtcggacaaacggcggttagtgatgcgcgaccataaaatcgggtgcatctccgccatgttggaaccccacagcacaaacgcatcggcctgctcaatatcgtcgtagcagcccatcggttcatccatgccaaaggtgcgcataaagcccaccaccgccgaggccatgcagtgacgcgcattcgggtcgatgttgttagagcggaaaccagccttgaacagtttcgcggcggcatagccttcccagatggtccattgacccgatccaaacatgccgatcgcttctggtcctttctctttcagggaggttttaaacttctcttccatcacatcgaaggcctgttcccagctcaccggcgtaaactcgccgtctttgtgatagctgccgtctttcatgcgcagcatcggctgcgtcagacgatctttaccgtacatgattttgggcaggaagtagcctttaatgcagttcagaccacggttgaccggcgcgtcggggtcgccctggcaggcgaccacacggccctgctgcgttcccaccaacacaccgcaacccgttccgcaaaaacggcacggcgctttatcccatttgatggcttcctgctgcccgacaacggcgcgggcgacgcccggcacgctcagaccggcagccgccgcagcggccgcaacggcgttagctttcataaagctacgacgactgagtttcatggtgtttcctcaccttgctcatcctgctggtgataaaccagcgacaccgccagtacgccctcgacattgcgtactgactcaattgtttgcatcagcgtttcactctgatctgcttccgccaccacgatcagttgcccgctttcaacatcgcttaacgcgacttcgcaacccggcaacgtgttcaactgtgtgccaatggcggcgatgttctgacttttggcctgcacgaccaggctacagacctgccagttagtgcgcatggtggttctccgctttgatggctgacacggggcagatagccacacacgccccgcatccgttacaggcctgcgagtcaagctgcggctggtaaataccggataacgtgggacgaaaggtaatggccataggttcacaactgtcctggcaacgatggcattcaaccgattgcctggcgaggcagttttccgtgagcgtaaaaaccagatcccaggccctggtgtggcgcggaagaaaaagcgattcggtacaggcctgcgcacaggcataacaaaagctgcactcgccccgtttgaaatctacgctcggatatccccccgcccctcgctgcaggatgtcggcctcacacgcctggatgcaggcgtcgcaacgcagacaatgtgcgagaaaataggtcgtttctctggcccacggcggaagaatcccattgctggcgttgcgccaactgccggtcaacatgcttcgacgggataaatcaaccatgatatcgcccttccataacgacacgcttccatagggagtgaataccaataaaaaccgtacaatttatgagtagttgtttttgtaaataagatatttcaggatgtgtaagagatgcataccccgatagaggtaaatgctgttgccggatcaaaagagtgccgggtaaagacccgtaaacgtgctttttctcacatttcaatgagttatatagatatttatataacgaaaaccactaatagctgataatttcatttacattatcaatatcagaatattccactatataaaaagacgctattttattaataatcttgaaaatatgagtaaatacagattaatagataatatgaatgtgttaatctgttgtcagtgaataccgaaaacagcagaaaggaaatactgtgaacaatcaaatgaagatgtttgtccctgccgtcgtcttcgccgccctcgccagcgcctctgcctgggctaacaatggcgataccgcccagccgctggaaaaaatcgccccctatccgcaggcggaaaaaggaatgaagcggcaagtgataacccttacccctcagcaggatgaatctaccctcaaagtggaactgttgattggccaaacgctgaatgtggattgtaaccagcatcgcctcggcggcacgctggaaacaaaaacgctggaaggctggggctatgactattatgtctttgataacgtcacctctccggtatcaaccatgatggcctgccctgaaggtaagaaagagcaaaaattcgtcaccgcctggctgggtgaagacgggatgctgcgctacaacagcaagctgccgatcgtggtgtataccccggcgaatgtggacgtgaaataccgcatctggaaagcggacgctaacgtacagaacgccgtcgcgcgatgatgttacgctgcccggtcacacttaccgggcatctgaacacgccgactcacgcagcgctccggggttctttttaaaacacgtctggaaacccgctcgcccgcagcaaaaaataccccgatgcctggtggcgacgcgtggcatcttatcaggcctacccgcgtgcggacgtagggctgccatcaggcggtttatccggcgccataatccattacgcagtacgcgcaaccgcatcacgcgaagcggcgtcacgttcgtcgccggtgagttcggttaactgcccgttacgcatttcaagcagacgatcggcgtgaataaaatagtgatcatcatggctgatggcgaaaatggttttgcccatttcctgcattaacggcaacagtacctgataaaactcccggcggaaatgcgggtcctgatcggcggcccactcatccagcaaaataatatcgcgctcttccgccagcgccagcagcagtgcaatgcgctttttttgccctttcgacagtttaagattcaagatgcgcccgtcgtttagttccagcttgtgcgtcattttcaggtgctcaagccacttttcgaccagcgcgggattggcgggtttcccctgcggccccagcaggcggtcgaataaccacacatcggtgaacaccgcagaaaacagtttgcgataatcttccggctgcccggcggcaataggttgaccgtcaagtaaaatcgttcccgattgcggctggtataaaccggtcaataacatggccagcgtcgatttcccgctaccgttgccgccaattaaaaacagcagttcgccgcggtgaatcgtcaggttgatgggccccacggaaaacgcgttatcctgatagtggaaaaccacgttgcgcagctccagcgtcttccagtcgggaaaggctttcggctgtggaaaatcaggcttatacggggcgagcgcgaatttattcagtttattaaacgccacctgggcggtcagtagcgttggcaacgcccccaccgcagacagcagcggcgtgcgcaggaacagcaacgtcagtgaataggtcgccgcgacgttggtatccgcccagccgagactattcgccatccagaagaccaggcctatcgctcccagcatcatgatattcgaccagttgacggcgctcagatgaaaagtatcggcacggataatgtgatgacggtactctttggcgtccggggtatagcattgctgaaaaatctgctccgcacgctcgcggtttagcgtcagctctttgcgtccttccagcaccgtctgatagtcgttgtacagcttatcttcggtctcgcgcagggtcgccatatgctggtaaacccgcgccaccagcacaaatccgccccagatagtgaccaccatccagatagccgtaaccagcagcatttttgtcgatagcatcgccagatacgccgccgagccgacggtgaggataatgccctgcaccagctcaggcagacgcacaaaggcgatagtaatattgcgaatatcgctggtcagaccggccagtaaagaggcgctgcccagttgctcaatgcgttcaacgtgcgtatccagaatgcgcttgataaattcgctgcgcaggcggtaaacgaaatggtgtcccagagtggtgagcgccagttgggaacctaatgtgacgaccattagtaacaggagcagaccgagaaattccggcagcaccatgacggtggtgtccaccgtttcaatcaggcgctgattgataaacgcgatcaggccaatccccagcgccgcgctggcgaggctcagcgccatcacgctaataaatggccagcggtactgccgccagacaagaataagaagttccatgcatacaacccggaccgataataacagcccgcagtttaactaactccacctgcacagcaataataattcttatttttattctttttcagctgcctgacggaaggtgagattgtaacgaaattcaccggtcatgggatgaaagcccgctttaagcggctggataccatgataaaacagccgggactcgccgccccagaccacgatatcgccatgctccagtaagatccgctggatcgggtcgctgcgacgcaggccgccaaactgaaaaaccgccggcacccccaacgaaactgagacaataggcgcgcgcagatccggctcgtctttatcctgatgcagcgacagttttgcgccgggcgcgtagcgattgatcaggcaggcgtccggttggaagctcgcataccctgccgcgattgccgcctgacgacatacgctggcaaacgataacggcagcgcaggccagggtttatcagtcaacggatcgcgcacggcataacaataaccgtgacgatcggtagtccaccctaacgcgccgcagttggtcatcgccaccgacatggtgtagccgcccggcgtcaccatctgacgaaacggagactgactggcgacaaacccgatatcgtctaatagcgactgcgccgcgcgaaacgcaaagcggcgcaacaccaccgcgccaggcgccaggggctcttgccagggcgcttcatcagcaaatagatccagcattgctactcctctttttgcgcttctcgctttaatagctgcgcttttcgacgcacgccccaacgataaccggagagcgcgccatcgcgacgcacgacccgatgacacgggatcaccatcgccagtttattcgcgccgcacgcgctggcgaccgcgcgtaccgccgtgggtttgccgatagtcgcggcaagctgttgatagcttacggtttcgccgcagggaattgcgcataacgcctgccagacctgctgttgaaacgcggttccctggatatccagcggcaacgagagcagcacatcgcgtgtgttgatagccgcgacaacctgccgcacccgttgctgaaaaagcgcgtcagcaggttcgtggcgggccgacgggaaaagggtgtgtaattcagccagtagcgcgtcgtcgctatcaccggggagaatcgcgcaaatcccccgctcgctctccgccaccaggcaccgtccgtaaacccagtccgtcagcgcatagcgaacggagacattatcgccgcctttgcgaaactgttttgccgtcatgcccagcgtctggtcggcatgacggtagtagctactgctatccgggaagccagcgcggtaaatagccgccgtgatcggctctcctttcgccaaagcctcacgcagccgccgggcgcgccacgcctgctgccaccctttcggcgtcattccggtgctcgctttaaacagacggtgcagatgaaacgggctcatcgccaccgcctgcgccagaaacgccagcgttaccggcgtctcctgctcaagcaaacggcaggcgcaggcaatcttatccaaccgccgttgctgcgcgcgcgcattatccggctgacagcgcttgcaggggcgaaaaccggcgtccagcgcctgctgcgcgttggcaaaaaagcgaacatttttacgtaacgcccgcttcgagcgacaagaaggacggcaaaaaacgccggtggttcgcaccgcaaaaacgaaacgcccatccgcgctggcatcgcgcgcctgcacccgcagccagcattcatcatcgataagtaacgcttttttcatcatagactccttcattaagcatagtgcttgcttacatgcagtgtgtccgtaaatccgcccacaaaaacccgtaatcttgcgttttaattcttatcgctcaccaggaacgttttgaactgcggcgacatccaggttttaaagccttcaccttctttcatgatcataaataccgccagcccttccctccgcacgacctcttgcgccttttgcgtaccaagcaccatcaggccggtgtcccagccgtccgcttccaacgccgttggcgcgatgaccgtaaccgataccagattgtgttcaatggggcgccccgtttgcggatcgataacgtgcgagacacgcttgccatccagctcgtaatagttacggtagctgccggaggtgctgatgccatgcccgttgatatccacaatcgcctgcactgcgttttcccggtcggtcggcttctgaatcgcgacgcgccacggctgcccctgcgcattcatcccgcgactgcttaatgcgccgcccaccgagaccagataacgcgcaatgccctcctgctccatcagacgcgccagatgatccgccgcatagccctccccgaccgtggagagatcaacataaagatccggcagatctttttgcaaaaactgatgtccagccctgtcgataacctgcaaatgttgcaggcctgttttcgcttttgccgcatcgatttgtgctggtgttgggatatgcagcggctgccgatccggcccaaacccccacagattgaccagcgggcccacggtgatatccatcgcgccatccgtcttcgcgccaatacgcagcgccgaggtcacgatatccgccatggcttcgctgaccggccagggcgcaagactgcgtgaatggttaaaacgcatcaacgcggagtcatttttataggtagaaagcaaccaatcatcagcatcaagctgagtctggattttagtctgtaactctgcggcgcgtttcgcatcgataccaaccacgctcacccgccagagagtccccatcgttttaccttccagcacctgagcggcaggtgacgctgttgtcgtttcgggagcctcatcgcagcccataagtagaaaagccgccgccagacacacggcccggcaaaaagtcattttcatcgctgtttatcctcattcgaatggacgcaagcgtatatcaaaacgtcgtatttgtacgccggaataaggcatgaaaaaagggcccgcaggccctttagcaacatcttttgctgattagaactggtaaaccagacccagcgctacgatgtcgtcggtgttgatgcccgcatcgcgggtaaagtcgtttttatccagcaggttgattttgtaatcaacataggtggacatgtttttgttgaagtagtaagtcgcgccgacatcaacgtattttacgatgtcctggtcgccatagctggcgccgtaaccgttgctgatgtccttacctttagactgcaggtaagccacagacggacgcagaccaaagtcgaactggtactgagcaaccacttcaaagttctgcgctttgttggcaaaaccgtaagaggtggacgggttgctaccgttagaggtaccaaaacgggttgcgttataggtctgagaatactgcgctgccagatagatgttgttcgcatcgtatttcaggccgccggtgtaaaccgtggcgcgatcgccgttaccatacaggcgagcgttagcggtgttgttctgatcggcagtacgtttagacgtggtgatagcgccaccgacagagaagccttcgccgattgcataagtcagcgatccgccgtaaccgtcgccgttctggttcagcaggctgcgaccgttggtgttttcaccgctcacgctgccgtttttgccctgatactgtaacgcgaagtccagaccatccaccaggccgaagaagtcggtgttacggtaggtagcatagccgttaccacgctgctgcataaagttgtcagcgccgtaggtgtcgccgccgaactccggcagaacgtcggtccaggaggtcacgtcataggttacgccgtagttacgaccataatcgaaggaacctgcatcagcgaatttcagacccgcaaacgccacacgcgtccaggagtcgttgctgccttcagtctggttgccctgaatctgatattcccactggccataaccggtcagctgatcgttaacctgcgtttcgcctttgaagccgatacgcatgtaggtctggtcgccatcgctgcctttgtcgtcagagaagtagtgcaggccatcaactttaccaaacaggtctaatttgttgccgtctttattataaatttcagccgcattcgctgcgcccgccaccagcagagctggtaccaggagggacagtactttaactttcatgttattaaccctctgttatatgcctttattgcttttttatgccactgcttactggttaaccctcattaaccagtcggcaagtccattctccgcaaaaatacagaataatccaacacgaatatgatactaaaacttttaagatgttacagttatctacatagatgtttcaaaatatgaattttacggaacttttttaaagcaaaaatcaagtaaaaataagcacaaatagacaaaatatattcacgaaacttttaaaatcaacgggttaaattgatgaaattcatagcactgaatgataaaacagaatcttcattcgcaactaaaatagtgaccgctatcatcattaactttatttattaccgtcattcacttctgaatgtctgtttacccctatttcaaccggatgcttcgcattcggttttttttaccctttttcagacacacccggctgatttatgctacctgcctaaaactatcacggttattcactacactcccctgctcgaccgttcgtaagacattagcaaataatttcttgatatttagtgctaaacatttataagtagtctttatatttgtaccgttctgcgaaggttgtacgcttttcccgtcccgccgacggagcgcgtgttaagttgcccggcatgacgtaagagtctggaaattcattcattaccctttatactgcccttcaccttcagcgttgcttttacaggtcgtaaacataaatgagtcagtctgacacaacggtctctacccgattctcccttctaccgggaagcattacccgtttcttcttattgctgatcattgtgctgctggtaacgatgggcgttatggtacagagcgccgtcaacgcctggttgaaagacaaaagctatcaaattgtcgatatcacccacgctattcataaacgcgtggatacctggcggtatgttacctggcaaatttatgacaacatcgccgcgaccactacgccatcgacaggtgaaggacttcaggaaacgcgtctgaagcaggatgtgtattatcttgaaaagccgcgacgtaaaactgaagcgctgattttcggttcccatgacagcgccacgctggaaatgacgcagcgtatgtcaacttatctggatacgctgtggggcgcggaaaacgtgccgtggtccatgtattacctcaacggacaggataacagcctgattcttatctctaccctaccgttgaaagatctctcttccggctttaaagagtccactattggcaatatcgtcgattcccgccgggcagagatgttgcagcaggcgaatgcgctggatgagcgcgaaagtttctcctcattgcgaaaactggcctggcaaaacggtcactattttacgctgcgcacgaccttcaatcagccaggacatctggcaaccgtggtggcgtttgatctgcccattaatgatttaatcccgccgggaatgccgctggacagttttcggatagagcctgacgcaacccaagcgacggggcgaagcagtgaaaaggaagcgcctgatagcgtcacgattagctttaacggttcaaaaattgagatctcctcagcgcttaactctaccggaatgcgcctgatctggcaggtaccgttcggtacgcttttgcttgatacgttgcaaaatattttgctgcctttactgctgaacatcgggctgctggcgttggcgttatttggctacgccacgttccgtcatcagccgggacggtcgacggaatcgacatccggcaacgcggcgaataatgagcttcgcgtcttacgcgccattaatgaagagatagtttctctgctgccgctgggtctgctggtctacgatcaggaaggcaaccgcaccgtgatcagcaataaaatcgccgatcatctgttgccgcatcttaacctgcaaaatattaccagcatggcggaacagcatcagggcgtgattcaggcgacaattaataacgaactgtatgagatccgtctgtttcgcagccagatcgctccccgcacgcagatctttattattcgcgatcaggaccgggaagtgctggtgaataagaagcttaaacaggcgcagcgtttgtatgagaagaatcagcagggccgcgccgcctttatgcaaaatatcagcaacacgcttaaagagcccgtacgccaactggcggttaacgccgcagcagtcaccacgccggaaagcctgaaactggcggatcaggcggatgtattggtacgtatgatcgatgaaatccaactggcgaatatgctggaaaatgacgcatggaagagcgaagccacgctgttctccctgcaggatcttattgacgaagtcgtgccggaagtgctgcccgccattaagcgtaaagggctgcaactgctgattaataaccatcttagcggcaacgatgaacgctggggcgatcgtgacgccctgcgccggattttgctgctgttgattcagtatgccgtcacaacgaccgctatgggtaaaattacgcttgaagtcgagcaggatgaatctatcgcggagcgtctgactttccgtattctggatacgggcgaaggtgtaacgttaaacgagattgataatctgcatttcccgtatatgaatgaaacgcagggcgatcgttacggcaaagcgaatccgctcaccttctggctgtgcaatcaactggcgcgcaaactgggcggtcatctcaacattaaagcgcgagaaacgctgggcacgcgctataccgttcatgtcaaaatgcttcctcacgatcagcatactcaggtcgaagagcgcctgctggacgacgtgagcgtgatggtcgatgtgacgtccaacgaggttcgcgcgattgtgctgcgtcagttagaaaactggggcgccacctgcatcacgccggatgaaaggcagataagtcaagaatatgatctctttttaacggataatccgtctaatcttactgcctcgggcttgcttttaagcgatgatgagtcaggcgtgcggaaaattggcccgggtcagttgcgcgtcaactttaatatgagcaatgctatgcaggaagctgtactacaacttatcgaagagcagctggcgcaggaagagattcccgcctccccgctcggcggagatgaaaatgccgagcttcatgccagcggctattatgcgctatttgtagacacagtaccggatgatgttaagaggttgtatactgaggcggcaaccagcgatttcgctgcgctggcccaaacggcccaccgcctgaaaggggtgtttgccatgcttaatctggtacccggcaagcagttatgtgaaacgctggaacatctgattcgtgagaaagatgctccaggtatagaaaaatatatcagcgacattgacgcctacgtcaaaagcttgctgtagcaaggtagcccaatacatgaacaatatgaacgtaattattgccgatgaccacccgattgtactgttcggtattcgcaaatcacttgaacaaatcgagtgggtgaatgttgtcggcgaatttgaagattccacagcattgatcaacaacctgccgaaattagatgcgcatgtgttgatcactgacctctccatgccgggagataaatacggcgatgggatcaccttgatcaagtacatcaagcgtcattttccgagcctgtctattatcgttctgaccatgaacaacaacccggcgatcctgagcgccgtgttggatcttgatattgaagggatcgtactcaaacagggtgcgccaaccgatctgcctaaggcgctggccgcgctgcaaaaaggcaaaaaattcaccccagaaagcgtttctcgtctgctggagaaaatcagcgcaggcggttacggcgataagcgtctgtcgccaaaagagagcgaagtattacgcctgttcgccgagggtttcctggtcaccgaaatcgccaagaagctcaaccgcagcattaagaccatcagcagccagaagaaatcggcgatgatgaaactgggcgtagagaatgatatcgcgctgctcaactatctctcttccgtcaccctgagtccgacagacaaagaataaatcgcttttatgttacccagcctgatggcgctacgcttatcaggcctaccagtcgactcatcttttacaggccggacaggcgacgccgccatccggcattttttatgcccgcgttttacgtacccgctcggcatacaccgccagcgtctgtttcaacacatccagcgtcacaggcttcgacaaacagctgtccataccggactccaggcaacgttgtttctcttccgccagcgcgttcgccgtcacgccgacgacaggcagcgtcagcccaagctgacggatacgctgcgtcaggcgatagccgtccatgttcggcatgttcacatcgctcagaacaatatcgatagcatttttactcagcacattcagagcgtctacgccatcattggctgtcttacactgataccccagcgatcccaattgatcggccagcaagcggcgattgatcggatgatcgtcaacgaccagaatcatcatgtcgtcatttgaatctgcagttttatccgtcgtcggcaatgcgctggaaagcgcttcactatccagctcaatactatagatacgcgccaacagcgcgggcaactcatgcaccgacgccacactatgcacccactcgcccggcgctctttccaacggaatcccgatatgacggcggcaaaagacgaccgccgccctcccctgccaggtatgctccagcgcgtcatcgacaatcaaaatatcgtccgcggcgggttcttgcccttcataacgctgcgtatgaacgccgctacgcgccagactggtctcaataaactggcacaaagaagtattgcgcaccgccagccaacagcaggttccggcgagtccttccacgctctttttcacagggtattgcgcgccataaagcgggatgcgcagcgtaaactggcttcccatgccaggctccgaatcgacggaaatatcgccgtccatcatgctgatcaatttttcgcaaatcgccagccccagaccggtcccctgaaagttacgctgtacgccggttcccacctggaagaagggatcgaacaggcgaaccacctcttttgccggaataccgacgccggtatcccgcacgcgaatgctgagataatccccatcacagcgcacatgcagcacgatgcagccaatatcggtaaacttaatggcgttgctcaacaggtttgaaataacctgctgtaaacgcatcgggtcgccgttcagcgataccggcacgtcaggctcaataaaacaatacagaccgagctgcttacgcaccaccaacggcagataattggcggtgatatggttcatcacctctcgcggtgaaaattcgcgcggctcaatctttagctgttccgactcaattttcgagaagtcgagaatgtcgctgataattttcagcaacagactggaggagttattcatcgccgtgaccagacgttccacgccttttggcagctctttggtttgcagcagatcgagattgccgatgataccgtacagcggtgtgcgcaattcatggctgaccgtcgcaaggaacatggatttagactggcttgcctgctccgccgcctgcgccatctcttgcagcgactcttccattttgacgcgcgtactcacatctaccaacacgcaaatcgcgacgttttcattgcgatagcgggaatggacgaagctaatttgcaaattggtattattgctggtcaatacatcaacaaagttgacctgctggccgcaaataatttgcgtcaggcgctgtctgtcttcatgcgtgagcatgttcaggtaggtgtgcgccagttcgttactcagaatattgacaccatcaatagtgcgcagaatacagatccccaccggcgcggaggcgacgattttacggttgaactgttcatgctcttccagacgctgagcatcgctctccgccggaataaaaattcgccgctcatacatccgcgcaagcgtaaacagccctgcgcccaccagcacgttcagcaggatagcgttcaggataagaatacgaatacgctccaggactaaatctacaggcacagaatagacaatactgagcgaggatggcggcaggctttttttgagtaccagttcgcgaaaacctggcgtataaccaaaccaggaacgctcctgcatccagcgcggctccgctttaataatgccgtcaggaccggtcaacgaaatcagcgaatggccgttctcatcaataatagtgacgcccatcggcaaactgccgggcgtgaaaaaattttccatacggatggactgctcgacgcccagcagcgcctgcagacggttggccagatacaccggcgtcagcgcataaaagtagcccacgccctgacgcgcgccctggcttatccagaaaaggttattcccactttcttcctgcggcgcgttgcggtatttcataatccgctcatgtaacgcttttaacgcatcatcgcgctccacgggcatttcacgcaggccgaaattcgccatacagaggttatcgctgccaatcaggaaaacgcggttaagatcatacgccgctgaaaagttgtcgcgccagtaacgcataaaccaggccagcgactccagcgatccgcgccaggcggagcccatcgccgcacagtctgagtcggcaaatagcggttcaaagtccggcaccaccattttgtcatcacgcgcacgcgacgacatgacgccgttttccgccgttaaacggttctcggcgatatatttgagctctttcatcacatccgacgtgcgctggataaaacgctgcgcctgatcggagctaaggttgaactcctgacgaatttcagactcccgctggtgcagggcattgacgatgtaaaacaccgaaacaaaggcgattaagagccaaatgagtaacgctaacgctctgaataagtagcgcgagactttcagcgtagttcgaaaggaagcaaggtatttcaaaggggcgaagctccgcctcaggatgtaaatagagtgtgactaaggtagcggtaaatgacgtagcccgcaacggcaaagaaaaagggccggatatccggccctcgcacagcaataacattactcgtcagcgtcatccgcaacgtcgtcatcgctttccgcttccggggcgatatcctcatccccttccgccacgctgccgtcgatagcgtcgagttcttcgtcatctaccggttcagcaacgcgttgcagacccaccacgttttcatcttccgccgtgcggataaggataacgccctgggtattacgtcccactacgctgatctcggacacacgggtacgcaccagagtaccggcatccgtgatcatcatgatctggtcgcaatcgtctacctgtaccgcaccgacaacggaaccgttgcgctcggtcactttgatagagataacgccctgcgtcgcacgagacttggtcgggtactcgtccgctgcggtacgcttcccgtagccgttttgcgttacggtcagaatagcgccttcgccgcgtgggatgatcagagagacgactttatcgtctcccgccagcttaataccgcgcacaccggtcgcggtacgccccatcgcacggacggcgtcttctttgaagcgcaccactttacccgcggccgagaacagcatgacttcgtcagaaccagaagtcaggtcaacgccaatcagctcgtcgccgtcgttgaggttcaccgcgataataccggcggaacgcggacggctgaattcggtcagcgccgttttcttcacggtaccgctggcggtcgccataaagacgttgacgccttcttcatactcacgaaccggcagaatcgcggtgatacgttcgttggcttccagcggcagcaggttgacgatcggacgaccgcgcgcgccgcggctggcttccggcagctgatagaccttcatccagtacagacggccccggctggagaagcagaggatggtgtcatgggtgttagccaccagcaggcggtcgataaagtcttcttctttaatacgcgcggcagatttacctttcccaccacgacgttgcgcttcgtaatctgtcagcggttgatatttgacgtaaccctggtgagacagcgtcacgacaacatcttcctggctaatcagatcttcgatattaatatcggcgctgttggcggtgatttcggtacgacgctcatcgccgaactgatcgcgaattaactccatctcttcgcggatcacttccatcaggcgatcggcgctgcccagaatgtgcagcaattcagcaatctgctccagcagctctttgtattcgtcgagcagtttttcatgctccaggccggtcagtttctgcaaacgcagatccagaatcgcctgcgcctgctgttcagtcaggtagtactgaccgtcacgcacgccaaattctggctccagccattccggacgcgcggcgtcatcaccagcgcgctccagcatcgcagcaacgttgcccagatcccacggacgcgaaatcagcgccgcttttgcttccgccggcgttggcgcgcggcgaatcagttcgataatcgggtcgatgttggccagcgcaatcgccagagcttcaaggatatgcgcacggtcacgggctttacgcagttcaaaaatagtccgacgcgtcaccacttcacggcggtggcgcacgaacgctgaaatgatatctttcaggttcatgatcttcggctggccgtgatgcagcgccaccatgttaataccgaaggaaacctgtagctgggtctgggagtagagattattaagcaccacctcgcccaccgcatcgcgtttcacttcaatcacgatgcgcatcccgtctttgtcggattcgtcacgcagcgcgctgatgccttccacgcgtttatctttcaccagctcggcgattttctcgatcaggcgcgctttgttcacctgatagggaatttcatggacgatgatggtttcacggcccgttttggcgtcagcttcaacttccgcgcgggcgcgaatgtacactttgccacgaccggtgcggtaggcttcttcgataccacgacgaccgttgatgatcgcggcggtcgggaagtccggccccggaatatgttccatcagcccttcaatgctgatgtcttcgttgtcgatatacgccaggcagccgttaatcacttccgtcaggttgtgcggcgggatattcgtcgccatacctactgcgataccggaagaaccgttcaccagcagattcggaattttggtcggcatgacgtccggaattttttccgtaccgtcatagttatccacgaaatccaccgtctctttttcgagatcggccatcagttcgtgggcgattttcgccagacggatctccgtataacgcattgccgccgcggagtcgccgtcaatagaaccgaagttaccctgaccatccaccagcatgtaacgcagcgagaatggctgcgccatacgaacgatggtgtcatacactgcggaatcgccgtggggatggtatttaccgattacgtcaccaacgacacgggcagattttttataggctttgttccagtcattgcccaatacgttcatggcgtaaagtacgcgacggtgtaccggcttcaggccatctcggacatccggcagcgcacggccaacaatgaccgacatcgcataatccagataggagctcttcagctcctcctcaatgttgaccggtgtaatttctctcgcaaggtcgctcatctaaccgctatccctctactgtatcccggattcaaaggtcgcaaattataacacattcgcccacgtactggtaaacggaatgcagccagacaatgctttattcgggtgccgcatgctctcttcatttataagcgtggtctcggcgtttattggcgatcggcttcagaggcgacacaggggagatcggggcctggccaggaagaggttagaaaatcaatacctcccgtgtatacccgtcatacttcaagtttcatgtgcgttggctgcgagttactcggcccatccctgggcctcgccccgtcgcggttagcgcaagcgctgttcaagacggttaaccattttatcctgcaactcgaattatttaggggatatgccgggaggcataaaccataatcagtatcaccagatgctatttaatcacataggccagatattctttcactacctcatcgtttaattcctgacccaatccgggctgttccggcgcgacataatagccattttccggttgataatcgtgggtacaaagttcccgaatagatgctttcatcgcattggtatgatgctcatgaataataaagttgggaattgctgtttccatatgcagcgcggctaccgtggaaacaggaccgccgcaaacatgcacctgtacagtggtgtcataaatattagcatagtcacagattttctttccttcggtaattccgccgcagagacacaaatcaggttgcgctacggcaatagactgcttctccagtaattccctgtatccccatcttgtgtaggaacgctcgccagtggcgattggaatcgttgttgaacgggaaactttctgcatattatcagaatttaatggatgaatcggttcttcataaagaaagatacgatacttttctatcgccttcgcaaattgaatagctgagtttgtaccgagaagagaatggatttccacgataatatcagcatcatcccccattgcttcacgcatagcggcaattcgcgcttcccccatttttaattgatcggccagtaacaatcctgaatagttacgatttctattctgaaaaacacagtcatcgccattacgatcgatttcgagtggatccactttaatcgcatcatatccatcgtcaagagccgcacgcgccgcctcagcatattcctcaggtgtcactaatatatggcgtttatccccccaaccaaattgtaactgactagcataggttcttaatttttcattagttttcccgccaaggagctgataaacaggtacacctaaatatttacctttgatatcccaaagagcaatatcaatagcgctcattccggcataaaaaacgttcccgccccccatcccccaaaaagtctttctgaaaaagaactcccaaattttttcgatatttagtggatcttcacccacaatcaatggcgccagatctctgatgatccctacgccagctttagcgcctgcgccataggccagtcctacttcgccaataccacttaatcctgagtcggtattcacccggataagtactggattataggaggacatcgtttgatctcttttttttaattcacagtcaaaaacttcaatagacgtaattttcataatttctccatttatcaggttcgtgatacaacatttgtttgttggcttttttcttttttcacatcaattttcattaacgccaaaacggctaccgcagcgaagcaaagtattgcctctacaataaatattcctgtcgcaccataatgagtagaaacgaatcccagtgatttattaatcaggaatccgccaagacttgaacatgagttaataaacgcaatgctgatagccaaccctgacggcgacaataatgcagaaggcagcgcccagtaaggtccgtaatagctgaggatcccaacaccatagaacgttagccccagcattctcagcgacattgaggggacaagagcaatcatcagaaaaccacagcctgccagaaacatgggtaatgcagcatgccattttcgttcattctttttatcggaatgccagccccaccagggcatgctgaacatagcgaaaataaacggaatactcatgattaaaccaacgtcagtatccgtaaaatcagctgaaaatcccttcaccaaccccggcaaccagtagtttgccgccagagcagccgcctgaatcaacatgtaggcgaaagaaagctgaagcaaaactggatttttgattacggaaagaaaggatgagttggtatttttatttaatgcagctgcggtttcattgtcagtacgtaatttattaactaaggccgatatctgctgtggcgtaagccatttagccttttctggactgtcaggcagtaaataaaatgtcaggatgccaaggaatacggtagggataccttcaatagcaaaaagccagcgccagccttcataatccggggtattcaaatgctcgatgatccaaccagacatcggtgcagccaataccgatgcaacagcaatagataacatgaagaaactattgacttttccgcgttcacgagccgggaaccagcatgcaagataataaaccatgcccgggaaaaagccagcttcaaatacccccaaaaaaatgcgagccagcaaaatatgttgagtatctttagcaaaaaaaatcagcccagttaccgctccccagccgataataatggaactaatccattttcttgcgccaagcttttgcaagccaatgctactcggaatttgaaagattaaatatgatatgaagaatatagaagaaatattagcgaaatcctcaggcgtaataccgagagattcattcatgcgtaatgcagcaaacccaatattgacacgatccatatagttaaaaaagtaaagaataaaggccaaaggaatgattttcctttttacaatacgaattgcatcgtataaattttcttgtggactactcattttgcatcaccttttatgattcaatgaataagggtattgaccggaatcgatgttacgtaaaaaacaatacaattcaaaagctaatgtgtcatatctgatatatcagcaagcaaacttaatgaaatatacaataacaacaataaagtatgtaaattttcttatatctgatatattagatccgttaattttgaataaattaattacaatggagccgggtttaaccatggaggagaagaaaatgaaaaatagattaaagcgtgactttagtcacatatcaattgaaatacccaaatccatcacccaggtgattaaagagaaaataagggagatgattatccatggcgatttcgatcttgggcaagcgatcagtgaaaatgaactatcaaatattctgatggtaagtaaaacaccaattcgtgaagcttttatttggctgagctataatgaaaacttagtcaacatcattccccgcagtgggacatttgttttttctgtcaccgacgaggatatcaatgatctcatcaaaatgagggttatccttgaacagggcgcaattcgtgaagcgatggagaaaaatgctaacaatgtcatagtcgaattaagcaatattttatcgaagtcagcaaaaattaatgcagagcgagatacgcaagcttacctcaaactggatcatgattttcattatgtttttgtgaaatatgccgataataaatacatttcacaagcacacctgttgatctcagcacgtttattggcaattcgctacagactggattttaccgctgaatatatcaccagctctaaccgtggacatgccactattttggatatgttaaaaaacaacaacgtcgagggcgtctgtaattttatcacgcaccacatcggtagcggttttacagaacgcgcaagaaaacttcttgcgctgaaagcgtaataaagacggcagtagatataacgcagcgactttgcacctgctatactgccccgatagatcaatagcggaatctcatgtactcatgaacactgaaaaaccgtcggtagctcacaacgttgaccataatgaaatcgccaaattcgaagccgtcgcgtcgcgctggtgggatctggagggcgaattcaagccattgcatcgtatcaaccccctacgccttggctacattactgagcgctcaggcggcctgtttggtaaaaaggtgctcgacgtcggctgcggcggcggtattctggcggagagcatggcgcgcgaaggcgcaaccgtcaccgggctggatatgggctttgagcctttgcaggtcgccaaactgcatgcgctggaaagcggcatcgaggtagagtacgtgcaggagacggttgaggaacatgcggcaaaacacgcccagcaatacgacgtcgtcacctgtatggaaatgctggagcacgttcccgatccgcaatcggtcgtccacgcctgcgcccaactggttaaacccggcggcgaggtgttcttctcaacgttgaaccgcaatgggaaatcctggctgatggcggtcgtcggcgctgagtatattctgcgcatggtgccaaaaggcacgcacgacgtgaagaaattcattaagcctgctgaactgttaagctgggtagatgaaaccgtcctgaaagagcaacatatcaccgggctgcactacaacccgataaccaatactttcaaactcggtcccggagtagacgttaactacatgttgcatacccgcgctaaaaaagcctgacatcaaagaattttcctataagggttgcgttagatcatcgggcgcaacctttctcttcgatgaagaaatcagcattcgatcaaattttgatttttttttatgaattgttgacatcctctccaggccttatcagacgcgcatttagcgattcttacgcttttgcaaccgcaatttaacgccaaaatcaactcttgtactcaaaagaatccctactagaatactcaccatatagcgtttcacttatcgattaccccctatatatagtatttatccacagagttagtcacaacgtggcgttgtggataagcggggggatatttttctttcacggacaggtaaacaggtagaaaaccacatgaatcagagtctgctggtgacaaagcgtgacggccgtactgagcgcatcaatctcgacaaaattcatcgcgtgcttgattgggcggcagaaggactgaataacgtatcggtttctcaggtcgagctacgctcgcatattcagttttatgatgggattaagacctccgatatccatgaaactattattaaggctgccgcagacctgatctctcgcgatgcgccggattatcaatacctggctgcgcgtctggcgattttccacctgcgtaagaaagccttcggccagtttgagccgcccgcactttaccaccatgtggtaaaaatggttgagcttggcaaatacgacaatcatctgctggaagactacacggaagaagagttcaagcagatggattcgtttatcgttcacgatcgcgatatgaccttctcctacgctgccgttaagcagctggaagggaaatatctggtgcaaaaccgcgtgaccggcgaaatctatgaaagcgcacagttcctctacattctggtagcggcctgcctgttctcgaactacccgcgtgaaacgcgtcttgactatgtaaaacgtttttacgatgcggtctctacgttcaaaatttcgctgccgacgcccatcatgtccggtgtgcgtaccccaacccgtcagttcagctcctgcgtactgatcgagtgtggcgacagtctggattccatcaacgccacctccagcgcgattgtgaaatacgtttctcagcgcgccggtatcggtatcaacgctggccgcattcgtgcgctgggcagcccgattcgtggcggcgaagccttccacaccggctgcatcccgttctacaagcacttccagacggcggtgaaatcctgttcgcagggcggcgtgcgcggcggcgcggcaaccctcttctacccgatgtggcatctggaagtggaaagcctgctggtgctgaaaaacaaccgcggcgtggaaggcaaccgcgtacgtcacatggactacggcgtacagatcaacaaactgatgtatacccgcctgctgaagggcggcgacattacgctgttcagtccgtcggatgtacccgggctatacgatgcgttcttcgccgaccaggacgaattcgaacgcctgtacgtgaaatatgaacacgacgacagcatccgcaaacagcgtgtgaaagcggtcgaactgttctcgctgatgatgcaggaacgcgcctctaccggtcgtatctatatccagaacgttgaccactgcaatactcacagtccgttcgatccggttgtcgccccggtacgccagtctaacctgtgtctggagattgccctgccgaccaaaccgctgaacgatgtcaacgatgaaaacggcgaaattgcgttgtgtacgctgtctgcattcaacttgggtgccattaaaactctggacgagctggaagaactggctattctggcagtacgcgctttggatgctctgctcgattatcaggattacccgattccggctgccaaacgcggcgcaatgggccgtcgtacgctgggcattggcgtgattaacttcgcctactggctggcgaaaaacggtaagcgttattccgacggcagcgccaataatctgacgcataaaaccttcgaagccattcagtactatctgcttaaagcgtccaacgaactggcgaaagagcaaggcgcctgcccatggttcaacgaaaccacctatgcaaaaggcattttgccgatcgacacctacaaaaaagatctggatgcgattgtcaacgaaccgctgcactacgactgggaacagctgcgtgagtcgatcaaaacccacggtctgcgtaactccacgctatcggcgctaatgccgtcggaaacgtcgtcccagatctccaacgccaccaacggcattgagccgccgcgcggctacgtcagcatcaaggcctcgaaagacggtattttgcgtcaggtcgtgccggattatgagcatctgaaagacgcttacgaactgttgtgggagatgccgaacaacgacggttatctgcaactggtgggtatcatgcagaagtttatcgatcagtcgatttccgccaataccaactacgatccgtcacgtttcccgtcaggaaaagtgccgatgcagcaactgctgaaagatttgctcaccgcgtataagtttggcgtgaaaactctgtactatcaaaatacccgcgacggcgcggaagatgcgcaggacgatttggcgccttctattcaggacgatggctgcgaaagcggcgcttgtaagatctgatgaatagtgccgggtagcgctatgcttacccggcctacgattgtacggtttgtaggccggataaggcgcttgcgccgccatccggcgctcatcccataaaggattcacttcaatggcatacaccactttttcacagacgaaaaacgatcagctcaaggaacccatgttctttggccagccggtcaacgttgcacgctatgaccagcagaaatatgacatcttcgaaaaactgatcgaaaaacagctctctttcttctggcgtccggaagaggtcgacgtctcccgcgatcgtatcgattatcaggcgttgccggagcacgaaaaacatatcttcatcagcaacctcaaataccagacgctgctggattccattcagggacgtagcccgaacgtcgccctgctgccgctcatttccatcccggagctggagacgtgggtagagacctgggcgttttctgagacgattcactcacgatcctacacccacattattcgtaacatcgtcaacgatccggctgtcgtttttgacgatatcgtgaccaatgagcaaattcagaagcgcgccgaaggtatctccgcctactacgacgaacttattgagatgaccagttactggcacctgctcggtgaaggcacccataccgttaatggcaaaacggttgtcgtgaatctgcgtgagctgaagaaaaaactgtatctgtgcctgatgagcgtgaacgcgctggaagccatccgcttctacgtcagcttcgcctgctctttcgcatttgccgagcgtgaactgatggaaggcaacgccaaaattatccgtctgatcgcccgtgacgaagctctgcatctgaccggcacgcaacatatgctgaacctgttgcgtagcggcgtggacgacccggagatggcggaaatcgccgaagagtgtaaacaggaatgttatgacctgttcgtgcaggcggcgcagcaggaaaaagagtgggcagactatctgttccgcgacggttcgatgatcggcctgaataaagatatcctgtgtcaatacgttgaatatattactaatattcgtatgcaggcggtggggctggatctaccgttccagacccgctccaacccaatcccgtggatcaatacctggctggtgtccgataacgttcaggtcgctccacaggaagtagaagttagctcttatctggtcggacaaatcgattcggaagtcgataccgacgatctgagtaatttccagctctgatgggacgcgtcacgctgcgtatcactggcacacagctgctgtgccaggatgaacacccttctctgctggccgcgctggaatcgcataacgttgaggtggagtatcagtgccgcgaaggttattgcggctcctgtcgtacccggctggttgccggtcaggttgactggattacggaacctttagcgtttatccagccgggagagattttgccctgctgctgcagggcaaaaggcgatatcgaaatcgagatgtaactcagtgcaactcgctggtggaaaccaacggcatcacgccacgttttttcatctgcacggcatacagtgcgccagcgagtaccaccaacaccgcgccagcgacataaatcatacgatagccaactgactcaaccatcattcccatgataaaggcgccaatcgccattccggcgtccatcgcgttaaagaacagtgaattcgccacaccgattttatgcggttcaaccgagctgataatttgcgtctggaagaccggcgtgaccgaaccgtagccgataccgatgagaccaccggaaataatcatcatgatgctgccattggtgtagcccagcgccaccagaccgatggtaaaagccaacagacatggataaacaacatatttcggcccttttttatcacaaatattcccggtgaaggtacggcatatcatcagtaaaatcgcgtagcacagcaggaaattactggccgccgccattaaatccagctcacgcgcatacagcgccaggaaagccgacacgccggcataggagaaagtcataaaaaaggtgaccagcgcaaaaggcaaggcggcgcggtcaaacatcgcggaaaaacccagattcggtttcgaaccatcggcatgacgaattaccggaggaaccgtcacaatcagggaaagcacaatccctaacgccgctacagcggaacaaagccagaatgcggcagtgaacgcgtcccagcgggccatattcaaaccgatccacggtcctacgaccatcgccaggcccatcgctaaagagaaaaagctgatgccctctccacgtcgggaggccggaattaaccgcgctgaaatagttccttttaccgtggtaataacaccaaacgtaatcccatgaagtacgcggataaagagcagcgactcgatagaatggcaaaccggatacagcgcggtaatcaccaaaaaagccagagaagagagcaccagaatctttttattcgaatattttcccacccattgtccggcaaatggccgaataacaattgccgcggccaggaaacatgtcactaacagcccggccttatctgcagaagcatgcaggcggtcagcgatataaatgggtaataaagttagcagtacataaaaaacaaaaaagataataaaactgactatggtgattgcccaaaaatctttcgtccataatttttctttcattcttaacgacccgctcagatggcgcacgcaggcaacgctcagctcaactgaacacctatcaggtgcgtcaaaatgtgatgtattcgatagaatcacagtataaacaagtgcactctattagaaaaattaatcgttttaattatattgattaggttttactaatgacactaacccaaatccacgccctgcttgccgtactggagtacggcggatttaccgaggccagcaaacggctatacatgacgcaatccgccgtcagccaggccatctccgcgcttgaggaggagctcggcgttgacatattgattcgtgagcgtcgtaaagagatcgagcttaccgccgccggtagccgcatcgtcaggcacttacgcgcgatccagcgcgacgtcaacgcggtaaaagagattgccgaacaagaaaaaaagaacccggcccgtacgctacggattggctgttttcccagcgcctgcgcctgcattttacccggcgtcattcgctattttgaaagccatcatccaaatgtaaaaattatcccttatgaagagaacagtacggctattattgattcgctgcaggacggaagtattgatgccggtttcgttccttttccggtcaacggtatgtattgcgtccccatttaccgggataaattcaccgtagtggtgcctgaaaatcatcccctggcggccaatagtacggtaacggtcgaagaactgatggacgaaccacttattgtcagtaaaggtcgttatgaattaagcattatggcgttgtttaaagaaaagggtattgagccgatatttaaatatgaatttaaccatcccgatactgcgctgaattttattcgccagggattaggtatcgccttattgccagaattaaccttaaaagccacgacaggaaaattatgctccgtggcgctggaacccaccttttatcgacaaatttccctgttagcaaaagaaccgccggtagaaggaagtccgctatttttattacaaaaatgtatggaaacactgaccgatgaggggttgctataaaacaaccccgcctgatggcattgcgtttaccagacttacgctggcaaacgttgcgccaggccggatgaggcgtttatgccctcatccggcgcgtcacttcgactatggcaaacctttagtcatttttttgcaggaacatgaccgccttatccgggaagtcagtgaacagcccgtcgacgcccgccttgttatacaggatgtcgtacaactgattgacgtctgtggcatagtccggcaattgatcggcacgcacagtgtaaggatgcactaccatcttattctgatgcgcgtcttgcaccattccagtcagcttgatattccctttcgttgagccttccgcaaccagcatatggtaatccggaccaataccgtccgcatattccgccacctgcttcatagcgcccggcttaaacatccagtcgtagttgtaatttacccaacgaccgtccggctgtttctgctgtgtttcattccagtcggtatacgcaataagttgaaccagattgagatccatccccattttgggttccagttcattcttaatacgtttcagctcagcgacatcaaaacactgcaaatagacattgtcctgcttgccggtgtaaccatacttcttcagcacttccagcgttttcgcggcaatatctttcccttcctgatgatggaaccacggcgctttaatttccggataaataccgatatttttaccggtagagtgatttaatccctgaacgaattcaatttcctcttcaaaggtatgaatgcggaaatcagattttcccatcgggaaacggcccggataagtttgtacttttttgccgttttcaatatcaaacccttcggtaaacttcagggatttaatttcatccagcgtaaaatcgatagcgtaatagcgcccatctttacgcgcccggtccggaaaacggtcagcgacgtcagtcacccggtcaaggtagtggtcatggaggacgaccagatggtcgtcctttgtcatcactaaatcctgttccagataatctgccccttgcgcatacgccatcgctttcgccggtagcgtatgctccggcagataaccgctggcaccacggtgggcgataacgactttttcagccgccacggcgccgcttccgatggtcattcctgccaacattaacgccacgctaaggtttttcagtgtggttttcatgttattagcctccgttgcgttttaactgcagctcatcatgatggcgtttttcaccaatcatcacgaccaccagcaggattaccgccagaatgctgccgccaatcatcaccataaagccgccatcccaaccgaagaagtcaacggtataacccacaatggcgcttgcagcgacagaaccgcccaggtaaccaaacagaccggtaaagcccgccgccgtacccgccgcttttttcggcgccagttccagcgcgtgcagaccgatcaacattaccgggccgtagatcaggaagccgatgataatcatacaagccatatcaacgttcgggttccctgctgggttcatccagtaaacgatggtcgcgatagtcaccagggtcataaagaacacgccggtcgcgccacggttgccgcggaagactttatccgacatccagccacacagcagcgtgcccggaatacccgcgtattcatacaggaagtaggcccaggaggatttatccagtgcgaaatgcttcacttctttcaggtaggtcggcgaccagtcgagaataccgtagcgcagcagataaacaaacacgttggcgatagcgatgtaccacaacagtttgtttggcagtacgtactgcatgaagatctgcttcgcagtcagctcttcttccgctttttcgttgtagtcgtccggatagtcgtttttatactcttcgataggcggcagaccgcaggattgcggcgtatcgcgcatcattgcgaaagcgaacagcgccaccacaatcgcgccaaaggctggcatatagagcgccgctttccagtcgttaaaccaagccatccccagcaggaacagcagtggcgggatcccgccgccgacgttatgcgcgcagttccagaccgacacaatgccgccgcgctctttctgcgaccaccagtgaaccatcgtacgaccgcacggcggccaccccatcccctggaaccagccgcaaaggaacaacagtacaaacatcacggcgatgctggatgtcgcccacggcacaaagcccataaacaacatgactgctgcggccagaatcaaccctgccggcagaaaaacgcgcggattcgagcgatcggacaccgaacccattataaatttcgaaaaaccataagcgatggaaatcccggacagcgcaaagcccagatcgccgcgtgaaaaaccctgttctaccaggtagggcatcgcgagggcaaagttcttgcgcaccagataatacgcggcatagccaaagaatatccccaggaaaatctgccagcgtaatcggcgataggtcggatcaatctccgccgctggcaagcgcgctttatgcggcgctggtttaaaaatactcaacatattgtagcctccgtggcccatattttatttagaggtaaacaccgcagttcgttcaaacaaccccgctgctcccagtgtggccgcgatgttaagtaaagatacgtcacgttaatgtgaattacagcacatattgttacagatttatgactaatgttcagaaaggcgcacgaaatcacgtttcattttcgaatagtgagcgattatgcgcgaaatcaaacattacatatgatttgtatggctaaatgataaaaaacgaactgtgaggaaaaacaatgaaaactcgcgactcgcaaacaagtgacgtgattatcattggcggtggagcaacaggcgcagggatcgcccgcgactgcgcgctgcgcggtttacgtgtcattctggtggagcggcatgatatagcgaccggcgcgaccgggcgtaaccacgggctgctgcacagcggcgctcgttatgcggttaccgacgcggaatccgcgcgcgagtgcattagtgaaaaccagattttaaaacggatcgcccgccattgcgtcgaaccgacggatggtctgtttattacgttgccggaagatgatcttgcgtttcaggccacctttattcgcgcctgtgaagcggcaggcattcgcgctgaagccatcgatccgcagcaggctcgcatcatcgaaccttccgttaaccctgcgctcatcggtgcggtaaaagtgccggatggcaccgtggaccctttccgccttaccgccgccaatatgttggatgccagagaacatggcgcaatcgtgttaacggcgcatgaagtgaccgggctcattcgtgaaggcgcaacggtctgcggcgtccatgtgcgcaaccatctcactggcgaaactcagacgcttcacgcgccggtggtggtcaatgcggcaggtatctgggggcaacggatcgccgaatacgccgacctgagtattcgcatgttcccggcgaaaggctcgctgttgatcatggaccatcggatcaaccagcatgtcattaaccgctgccggaaaccatcggatgccgacattctggtacctggcgatacgatttcactgatcggcaccacctctacccatattgattacaatgagatagacagcaaccgcgtcaccgcagatgaagtcgatatcctgctgcgtgaaggggaaaaactggcccctgtcatggcgaagacgcgtattctgcgcgcgtattccggcgtccgcccgctggtggccagcgatgacgatcccagcggtcgtaacgtcagccgcggtattgtgttgttcgaccacgccgaacgcgacgggcttgatggcttcattaccattaccggcgggaagctaatgacttaccgcctgatggcggaatgggcgaccgatgccgtgtgccgcaagttgggcaatactcgcccctgcatcacggcggatacgccgttgcctggctcaaaagagtctacggaacatacgctgaaacgcattatctcgcttcccgcgccgctacgcggatcggcggtttatcggcatggcgatcgcacgccggggtggctgagtgaaggccgccaacaccgtagcctggtctgtgaatgcgaggccgtcacggcgggggaagtgcagtatgccgtcgaaaacttaaccgtgaatagcctgctggatctgcgccgtcgcacccgcgtagggatgggcacttgccagggcgaactgtgcgcctgccgcgcggccgggctattgcagcgttttaatgtgacgaccgcggcgcaatctattacgcaactctctgaatttctgaatgagcgctggaaaggcgtacaacctgtcgcctggggagacgcgctgcgcgaaagcgaattcacgcgctgggtttatcagggattatgcggtctggagaaggagcaccaggatgaaatttgatacggttattatgggcggcggtctcgccggtttgctatgcggactgcaactccagcagcatggattacgctgcgccatcgtcacccgcggacaaagcgcgctgcatttttcctccggctcgctggatctactcagcgccctgcccgacggccaaccggtgactgacattaccgccgggcttgatgcgctgtgccgccaggcgcctgaacatccttattcgcgtttaggcgcgcaaaaagtccttacgctggcgcaacaggcgcaaacgctacttaacgccagcggcgcgcagttatacggtgacgtacagcaggcgcaccagcgtgtcacgccgcttggcacattgcgttcaacctggcttagctcgccggaagtaccggtctggcccttatccgcacagcgaatttgcgtcgtcggcgttagcggattactggatttccaggcgcaccttgcggcagcgtcgctgcgccaacgcgacctcaacgtggaaactgcagaaatcgaccttccggaactggacgtactgcgtgataacccgacggaatttcgcgcggtcaatattgcgcgtctgcttgataacgaagaaaaatggccactgctgtacgacgcgctgtcgccaatagcgacaaactgcgacatgatcatcatgcccgcctgtttcgggctggcgaacgatacgctgtggcgctggcttaacgaacgtctgccctgcgcgctcacgctgctgccgacgctgccgccatcggtgctcggtattcgtctgcacaatcagctccagcgccagtttgtccgtcagggcggcatctggatgccgggcgatgaagtgaagaaagtcacctgccgtcgcggtaccgtgagcgaaatatggacccgcaaccatgccgatatcccactgcgcccgcgttttgccgtacttgccagcggtagcttctttagtagcggtctggttgccgagcgcgaagggatccgcgaacctattttagggctcgacgtacagcaaacggccacccgcgccgaatggtatcaacaacatttcttcgacccacagccctggcagcagtttggcgtcgtgacggatgacgctttccgcccctcccttgcgggcaacacggtagaaaatctgtatgcaataggttctgtgctggcgggattcgatcctatagctgagggatgcggcggcggcgtctgcgcagtcagcgccctccaggccgcgcaccatatcgctgagcgtgcaggagaacagcaatgagcgacacacgttttgaaagttgtataaaatgtacggtgtgcaccaccgcgtgcccggtcagccgcgttaatcctggctaccctggccctaaacaggccggaccggatggcgaacgcctgcgtctgaaagacggcgcgctgtatgatgaggcgctgaaatattgcattaactgcaaacggtgtgaggtcgcctgtccgtcggacgtgaagattggcgatatcatccagcgcgcccgcgcgaaatacgatacgacgcgcccgtcattgcgtaactttattctcagccataccgatctgatgggcagcgtttcaacgccgttcgcgccggtggtcaataccgccaccgcattaaagccagtgcgccagttgcttgattacgcgctcaaaatcgatcatcgccgcaccttaccaaaatactctttcggcaccttccgccgctggtatcgtagcgtggcggcgcagcaggctaaatacaaagatcaggtcgcctttttccatggctgttttgtgaattacaaccatccgcagctcggaaaagatctgattaaggtgctgaacgcaatgggtactggcgtacagttactgagtaaagagaagtgttgcggcgtaccgctgatcgctaacggttttacggataaagctcgcaaacaggctatcagcaatgtggagtcgctacgcgaggcgattgccgtcaaaggtattccggtcatcgccacgtcatccacctgtacgtttgcgttgcgcgatgaatatcctgaagtgctggacgtggacaacgccgggctgcgcgaacatatcgagctggccacccgctggctatggcgcaaactggatgcagggaaaacgctgccgcttaatcctttgccgctgaaagtggtctaccatacgccgtgtcatatggaaaaaatgggctggacgctttacacgcttgaactgttgcggcaaattccggggcttgaattgacggtacttgattcacagtgctgcggcattgccggtacgtatggatttaaaaaggaaaactatccgacatcacagtccatcggcgcgccgctgttccgccagattgaagagagcggcgccgacattgtcgtcaccgattgtgaaacctgtaagtggcaaattgagatgtctacaagcaaacgctgcgaacaccccattacgctactggcccaggcgctcggctaagtaaaaagcgccggagcccctccggcgccattaccctactcaccagggacgattttccatcagacatatacccttcatacttcaagttgcttatgtgttggctacggattattttgggtataaacgcggatgtctctttgcaataacctgccctatttggttaaccatgaccgctaacccacggtggcatgacagataacgacgttactgtttatagagcaatatctcttgtatcgacgcgttaccagccacctttaaagagggggataactgaatatccccaataataattgagtgttatgtgaataataagaaaatcaggtctatgcctgatttaatatatcccccgctaataataatatttttacaaataattatacattacatcatattcgctactttcacttaccaggaaacagagcaaaatgaatatatgtgtaaattcactttaccgattgagcataccgcaatttcacagcttatatacagaagaggtgagcgatgaggcgcttacattgttgtttagcgccgtagagaacggtgatcagaattgtattgatctgttatgcaatcttgcgttacgcaacgatgacctggggcatagagttgagaaatttctttttgatctctttagcgggaaaagaacgggatcatcagatatagacaaaaaaatcaatcaggcttgccttgtattacatcaaatcgccaataacgatataacaaaagataatactgagtggaaaaagctacatgccccttccagattactttatatggcaggttccgcgacaaccgacctttctaaaaaaataggaatagcacataaaattatgggcgaccagttcgctcagacagatcaagaacaggtaggagttgaaaatctttggtgtggtgcgcgaatgttgtcgtcagatgagctagcagctgcaacgcaaggtctggttcaagaatcacctcttctctcggtaaactatcctattgggctgattcatcctaccaccaaagaaaatatattaagcactcagctacttgaaaagattgctcaatcaggattatctcacaatgaagtcttcctggtaaatacaggagatcactggcttctctgtttattttataaacttgcagaaaaaataaaatgccttatatttaatacttattatgatttaaatgaaaatactaagcaagagattatagaagcagcaaaaattgcaggcatatcagaaagcgatgaggttaattttattgaaatgaatttacagaacaatgtacccaacggctgtggtctattttgttaccatacaattcaactcttatcgaatgccggacaaaacgatcctgctaccacactacgagaatttgcggaaaatttcttaacgctttcagtagaggaacaagcactatttaacacccaaacccggcggcaaatatatgaatacagtctccagtaatggtgagtacttagagcctatcccattaggctcttatcctgaaatgatgctctgcgaagaatttataagtatataagggtgggaaggccaggccttcccactaaaagttctatgccgtcaatgattcaaccacgtctatccagccatgctcgctggtaatgtcctcgccattaagccaacggcgcagcatatttagcgccatcaccgcacaaacctcctgacgtattgccagactataccgataggcgctaaaacgcatgcgtaaggcatacgtgccatccggcatttttctcaataactacgttttgccgtgcttactgactgaacagatttaaacatcgccaacctgctgtccagcgcctcggtgtagagcatcgtatctaccccgaccgcgacaaaattcgcgccccacgccagacatttctgcgccattgccggatcgaccgccaaaaaacccgccgcttttccggcggcgcgaatacgataaatacacgcttcaatgattcgctgcacttccgggtgtccggcattatcggggtaacccaatgaagcagagagatctgccggaccgataaagacgccatcaatgccttcaacctccagaatcgcgtcaaggttttccagcgccactttgctttcaacctgcaccaacaggcagagcgactcattggcctgtgccatatagttgtcgattctccccagcgcgccgcacgcgccacgctcgcgccaacgcctcgttgccccaacggcgggtatcgggtagcggaaacgacctggcgcgcctgttctgcggtgtcaaccatcgggatcagtagcgtttgcgccccgatgtccagtacctgtttaatgagcgctttacttccctcgatcgggcgaatcaccggctggctggcgtatggggcgatggcctgtaactgatgatacaagtcctgcaccgtattaggcgcgtgctcgccatctattaacaaccagtcataacccgacgtcgccgcaatctccgccatataagaggtggttgaactgagccacaaaccaatttgcgtatcccctttacgtaatccttctttaaaaggatttgataacaatgcgttcatagcgatccttacaacgtagataagattaatgatgcgcagcgccggattgcgccaccggacgattaacgctcagcgtgaagataattaatgagccaatgatggcgactccggccagcgtcagcaggcccgccgcatcgctggcaaacaacgtttccgcttttacgcgcagaattggggcaataaaaccgcccacagcgccaaacagattaacgaaaccaattcctgccgccagagccgtaccggaaagtagctgcgttggcatggtccagaatacgggctgaacggcaataaatcctactgctgcaacacagagcgccagaatagcgagcaccggagaaaccagacctgacaggccaatgccaatgcccgcagccagtagcgtcactgccgcaacgttacggcgatcgccggtacggtcggagtagcgaggaataagccatgtgccaagcaaagccgccacccagggaaccgctgttaccaccgaagcggtaaagcccactttagtgcccaatagcgcggcaacctgggtcggcaggaaaaagatgagtccgtataccgccacctgaatcgtcagataaataatagccagttgccagacgcgtccattacgcagcgcatccgcaagccttgacgtgacctttttctcttcttcgctcgccagttgcctgataagcgcgttcttttcttccaggctaagaaaacgcgcctgctgcggagtgtcatcaagccagaaaaaggtgaatatccctgcgccaatcgccagtaggccttcgataacgaacatccagaaccatcccgggtgccccataaaaccatgcatctccagcagagcgccggagagcggcgaacccaacgttaacgccagcggcgcccccatataaaatagccccataatgctggcacggttacgctgcgggaaccattgtgaagttagatagatcatgccggggaaaaatccagcctccgccgcgcccaatagcgtgcggattatcagaaattttgcttcactatccgcccaggccatcgcagcagagagaaagccccacagcagggtagtcgtgccgatccaggttcttgcgccaaatttgcgcatcagcaggttagccggtacgccaaggaaagcgtaaaccacaaagaaaataccggcccctagcgcgtaggcttcattacttagcccggtatctatctgataggtctctttggcaaaaccaatatttgaacgatccagaaacgccagtacatacagcgccaacataaaaggaattaaacgtgcgcggtttttcttcactacgccgtcaagtaaagtgatgctcatagcaatatcctcaacaggatgagggcgttgccgtacaaaggcaacgcacgagttattagtggctataagggcgtttcaagtgacagtcacggttaagctcgacgccgaagcccggcttatccagcactgatttatggatgcgtccattcaccggcaccggctcatccaggagaatcgggtcaaattgcggacgcagagtggagcagtccgggctggtcatcaggaactcgctgaaaggggtattagtgaaagtaataactgcatggtgcgaatagacagacgaaccgtgcggcaccaccagttgcccgcgcgatttggcaagcgcggcgatctcaaccagcgtggttaatccgccgcaccagccaacatccggctgcataatatcaatgccggtttctgccagagtgcggaaggattgcagcgtaccatggtgttcgccgctggtaaccatcatccctgcaggcgcgttgcgttttaattcgcgatagccttcatactgctgcggcggcagacactcttcaatccatttgagattaaatggcgcacaggcgtgagccagtttagtcgcatagttcacatcctgactcatccagcagtcgagcatcagccagaaatccggcccgcacttttcacgcatatccgccaccatcgcggcatctttacggatccccgcatcaccatcgtgcggtccccagtgagtcggcattttaccgccgataaagcccatttctttagccagatccgggcgtgcgccggtggcgtaaaactgaatttcatcgcgcaccgctccgcccagcaatttataaaccggcagcccaaccaccttgccaaacaaatcccacaacgccagatccacacaggaaatcgtgttcatcaccagaccgccggaaccggagtagtacatggtcgcgccgagcatctgatcgtgaataagtttgatatcgcttacgcatttgccttcaataaaccggttaagatgtgtttctacgataaaacagcccatctcccctgctgtcgaaacggcgaaccccgtctgcctattttccgcctctacttcgacaatcagcgtccctaacacgttgatcccaaaagactgacgagactgctcatagtcgcgatatttgctcatgggagtggcgatatggtcatcaatccagtgatttcctccctggtcgtgataatccccgccgccagcccctttctctgcggtagcgcccccaataaaccaggctcgaacgtgtttaattttaggaagagtcataatattctccattttaagatgcgagtgagtcgaagggacttttccatcccaacaggcgtgaaatatctttggcacaggcaatagctttaccggccaaataatctagattctcttcgttgatttgcaggcgcgtgccgaccactgaaattgccgcggtcagttcgtttctggcattaaataccggtgcggcaacgcagcggacatccggataatcctccccgttatcaaagctccatcctcgctggcgaatgcgctccagctcatcattcaattgttgcggctcggtgatggtggtcagcgtggctcgctcccataccagttgttcaataatggctttgcgtacggcggccggctgccatgccagcaggcatttgccgatgccggaacgataaagagagaggcttttcccctcatgcgagcgcacgctgatagtggatgaggattccactttcagtatgtaatacgcattttcgtggtcgatgatccccaagtgacacagcagcccggtttcatccatcagttgtgttagacgaggacgcgccagctcccgcagatccatcttgctgagcgcatgacccgacaattcaacgagcttagtccacaggcagtagttatcctgatgatcgaggctaataaatcgctgacgttttaattcattcaacagcaggtacgcggtgctttttggaatacgcagcgtttcaataatgattgccgcgctgcatgggccaatacgcgcgatcaaattgaggatgtcgattgcgcgagtaagagccgggactttacttgattccaacatattggactccagtctgagacactggaatcagtgtgaaaggtcagtagggaaaaaattgtgaagcgcgtcaaagcttatccgccttccaacggagtggaagggttaaccatataaatgtgaattaacgcacgtattactttgtattcagtacaattggctggacaaaaaagcagatgatattgccggataatggcatagcggccttatccggctcacgatgtcgttcccatcgcagataagagaaagggattatgatgtcaatgattcaaccacgtctatccagccatgctcgctggtaatgtcctcgccattaagccagcggcgcagcatatttagcgccatcatcgcgcagacctcctgacgtattgccaggctataccgattggcgctaaaacgcacgcgtaaggcatacgtgccatccggcgtcgccagcgcgaaattaagatgttcgttttccagccccgacacggccagcgccagaccggcataatgattgctgcgccgttctgtcgtccagtgtgccgtttgcgccagcgtctcttcctgagaaggaacgacttcgctggcaagaacaggcgccccggcgcgggaaagctgtagcgccagtaagccgctggtgtattgctcgctcaacgtcagactcaactgcctttcctgcaggcggcgggctatttgcgccggcaggttttccgtaccttcaaaaatcaggttctgcccggcaacccgtttgacctctggccataacgccagcatcgcctcccgttgcgtcgccgggccggtcaatttcagttcaatgatcggcattgatgagcgataccccatcgtcacgccgggcggcaacggcagtgaatcgagacgctgcgcgaggtcactttctgaacgtccaaaagtcgttaaccgcaggcaaagcggcggctccggcagcgaaaaacgcgcgcgtaaccgcggtaagatttccttctccaccataaccttaaattcagacggtacgccgggggtgaaaaacatcaggcagcggttgagctgtagcgcaaatccacaggcagtgccgagcggattattaataaactccgcgctggcaggcagttccgcctgtttacggttgctcggcgccatcacgcggccacgctgctgaaagtagcgttccatttcggtcagccacgcctggtgcagtactaatccttcgccttttgccgttgccgcggcgagcgcgcttaaatcatcgctggtcggccctaacccgccattaacaatcaaaacatcagcatgttgactgcgttcacgcaagatagcgaccagactgtccagattatcgcctaccgtatttcgccgtgataacggaacgccctgatgaaagaaaaaatcagccagccaggcggcattggtgtcaacgatttgtccgtgcaacacctcatccccggtggatagcatttccacatttagcattgtgttctcctgctcttatgatgaaaacactataacgcaaagacgaatatgacgtggaaagaagaatgacgggaacaggaggaatatggcgcgacgattgccgcgccgttagcatcaaaagctggcgtttacgccaacataagggccgtcagcaatcgcattatcgcggttgccgtctttacccgccaggttcaggtaacgataaccggcttcaatgctcagcgggcgcataatggtgaaacgcgcgcctgcattcgcttcttcataactgtcgataccgctggacagcgaatctggtgaataataatactcgccgaacagacggaagctgttgccgattttccattgtagcccaccgccgacagccgccgcatagccttcatcgctgtctttcggattggtataaatacctttaccgccgaccgtcgccagcagcggtcccaccggaatgttcagccccagacccacgcccgcagcatcgccatcatcatcgttgtgcatccagttgccgcttagcgccagtcccgtcgattccgtaccaaaacccacgccaatgttggtgtaatcttcgcccgcctggccgctaatactgatggcctgcgccgatgcagaaacgaacagcattccggcaaaacctaataatatgctttttttcatttttaccctttccagcaagcacataaagaaaaactccccaaaacggcagaattgtactgccagacgctgaggaatcaatgcactaagaaaccattccaaaaacatattgtaacgaaatactactttcgccatgacgcatcattgcgccatcacatggcgacgcctgcatcaacaaaattaacaaaaaacgcagtctgcgttatcgcttccatttttcacaaagaatttcgcagaatgatttgttaagctgatggcctggtggtttaaggaagcgacttatgcgtcaacgaactatagtttgcccattaattcaaaatgatggctgttatctgctgtgcaaaatggccgacaaccgcggcgtctttcccggtcagtgggcgctgtcgggcggcggggtcgagccaggcgaacgcattgaagaggcgctgcgtcgggagattcgggaggaactcggcgaacaactgattctgagcgatattacgccgtggaccttccgcgacgatatccgtattaaaacctacgctgatggcagacaagaagagatttatatgatttatctcatcttcgactgtgtttccgctaaccgcgatatatgtattaacgacgaatttcaggactacgcctgggtcaagccagaagaactggcgctgtatgatttgaatgtagcgacacgccacacattagcattgaaagggttattataatgacgacagccgcttcaggctgtctttacgcttttaacatgcggctagccgggaacaaattcaccatctaaaaagagttttccgttttccgcatgcataacgagcgcattaagatagtccggatcaaactttacgccgcgcttattttttgcaatatacgtcaaacaatgattatgggtaaaaatgactatatttttattctgcgactttttcagtaacgtattgattgaagcataaataccgctgccgcaatccatcatttttttatccaccgtaagcgacctgcccgcagaaaaccaggttgccgactggatggtgcgcaccgtattactggaatagagattgtaattttgtatatcggcactgaaggctttacccagcgctctggcatcttgcgcacccttgaccgtaatccccgtgctgtctgacaggcaggtattatcggaacgatcgcaccgctcggcatggcggaataacacgactaccggatgctgcttcgccagcgccgccagcgctttaccgttaatctgcggtagaccgttaccactccaggcatgttgtgaggtcaacccggcgataataaccaacgcccccgccagaatcgcgaaatagcgtttgtttttaataaagcgtagggtaaatgccagcacattaacctctcaggcagacagtgcagctaacttaatagcaatacaattaaaatgaaattccgcaacggaagaccaggccagaaacataaaaacagcttttgggcatgcataaaatgccttaaactttcggcgaaagcaaagcataattccgttaaaaattatctttttacttcaccttaatttcttaatgttaatttaatcttcatccagtagggttcagctaaatgcgttaaaaaataagcccttttctattgccgaaatatttgaaaagcggctttcaatggctgaaggaaaaatgatgtcggactttttgcctttctcccgtccggcgatgggcgcggaagagcttgctgccgttaagaccgtactggactcaggttggataacaaccggcccgaaaaatcaggaactggaagcggcgttttgtcggctaactggcaatcaatatgccgttgccgtcagttcagccactgccggtatgcacatcgcgttgatggcgctgggcattggtgaaggcgacgaggtcattacaccgtcaatgacgtgggtttctacgctaaatatgatcgttttactcggcgcgaaccccgtcatggtcgatgtcgatcgcgatacgctgatggtcacgcctgaacatatcgaagccgcgattacgccacaaaccaaagcaattatccccgtccactacgctggcgcgcccgccgatctggacgctatttacgctcttggcgagcgttatggcattccagtgattgaagacgcggcgcacgcgacaggaaccagctacaaaggtcgccacattggcgcccggggcaccgcgattttctccttccacgccattaagaacattacctgcgctgaaggcggtatcgtcgtcacggataacccgcaattcgccgataaactgcgcagtctcaagtttcacgggcttggcgttgatgcctgggatcgacagagcgggggacgcgcgccacaagcggaagtcctggcgccgggctacaaatataatttgcccgacctcaacgccgctatcgcgcttgcccagttacagaaactggatgcgcttaacgctcgacgcgccgccatcgcagcgcagtaccaccaggcaatggcagacctgccttttcagcctctgagccttccgtcgtgggagcatattcacgcctggcatttattcattatccgggtcgatgaagcccgctgcggtattacccgggatgctctgatggcatcgctgaaaacgaaaggcatcggcacagggctgcatttccgcgccgcgcatacgcaaaaatattatcgcgaacgtttcccaacgctcacgctgcctgacaccgagtggaacagcgagcggatctgctcactgccgctcttcccggacatgaccgagagtgactttgatcgagtcattaccgcccttcatcagatagcaggacaataagcatgtttgacgccgcccccataaaaaaagtctcggtggttattcctgtctataacgaacaggaaagcctgccggaattgataagacgcaccaccaccgcctgcgagagcctgggcaaagcgtgggagattttattgatagatgatggtagcagcgatagctcggcggagctgatggttaaggcgtcccaggaggccgatagccatatcatctctattttactcaaccgtaactacggtcaacatgcagcgattatggcggggtttagccatgtaagcggcgatcttatcattacgctggatgccgatctgcaaaacccgccggaagagatcccgcgcctggtggcgaaagccgatgaagggttcgatgtggtaggcaccgtgcgccagaaccgacaggacagcctgtttcgcaaatcggcgtcaaaaatcattaatctgctgatccagcgcacaacgggcaaagcgatgggcgattacggctgcatgttacgcgcctatcgccgccctattatcgatactatgttgcgctgccatgaacgcagcacctttatccctattctggccaacattttcgctcgtcgggctaccgagatcccggtgcatcacgctgaacgtgaatttggcgactctaaatacagttttatgcgtctcattaacctgatgtatgacctggtgacctgcctgacgacgacgccgctgcgcctgttgagtctgctgggcagcgttatcgccatcggcgggtttagcctgtcggtattgcttattgtacttcgcctggcgctggggccgcagtgggcggcggaaggcgtatttatgctctttgccgttctgtttaccttcatcggcgcgcaattcatcggtatgggactgctgggcgaatacatcggtcgcatttataacgatgtccgcgcccgcccccgctattttgttcaacaagttatctacccggaaagcacgccgtttactgaggaaagccaccaatgaaagccgttatttttgcctatcacgatatgggatgtcagggggtgcaggccgtactggatgccgggtatgagattgccgcgattttcactcatgccgacaatcctgcggaaaacaccttttttggctccgtctcccggcaggcggcagaattagggattccggtttatgcaccggataacgtaaaccatcctatctgggtcgaccgcatcgctgagcttgcgccggatattattttttcgttctattaccgcaacctgttaagcgaagaaattctgcacctcgccccggctggcgcgttcaatctgcacggttctctattgcctgcctatcgtggccgtgcgccgctaaactgggttctggttaacggcgaaagcgaaacgggcgtaacgctgcatcgtatggtcaaacgtgccgacgccggagagattgtcgccagtcaacgcgtcgctattgcgcaggacgatgttgcgcttaccctgcatcataagctatgtcaggccgcgcgccagttgcttaatagcatcttgcccaccatgaaatgcggcgatataccttctgttccccagcgtgagtctgactctacgtattatggtcgccgcaggccggaagatggccttatcgactggcacaaaccggtttccacggtgcataacctggtgcgggcggtagccgccccctggcccggcgcgttcagctataacggctcgcaaaaattcactatctggtcttcccgaatgtgtccggatgcgcaaggcgcgcttcccggctcggtaatttcggtctctccgctgcgggtcgcctgcgccgatggcgcgctggagattattaccggccaggccggagacgacattactgtacagggctcgcagcttgcacagacgcttggtctggtggcgggcgcgcgtttgaaccgtccaccagcgaccagcggtaaacgtcgcattcgcgttctcatcctcggcgtcaacggttttatcggcaatcatttgaccgaacggttactgaatgaagagaattacgaggtctacggtatggatatcggcagcaacgccattagccgattcctgctccaccctcgatttcatttcgtggagggagatatcagcatccactcagaatggatcgaatatcatgtcaaaaaatgcgatgtcgtactgccgctggtagcaattgcaaccccgattgaatacacccgcaacccgctgcgcgtctttgaacttgattttgaagaaaacctgcggattatccgttattgcgtgaaataccgtaaacgcgtggttttcccgtctacctctgaagtgtacggcatgtgtacggacgcctcttttgacgaagacaaatcgaatctgatcgtcgggccggtgaataagccgcgctggatttactccgtttccaaacagcttctcgaccgggtgatttgggcttatggcgaaaaagagggattgcgcttcacgcttttccgtccctttaactggatggggccgcggctggatagcctgaacgcggcgcgtatcggcagttcacgcgcgataacgcagttgattctgaacctggtagaaggaacgccgatcaagcttatcgacggcggtcagcagaagcgctgttttaccgatattcgcgatgggatcgaagcattattccgcattattgtgaatgatggcgatcggtgcgatggcaaaatcattaatatcggcaatcctgacaacgaagccagtattcaggaactggcgacgctgttgctcgacagttttgataagcatccgctgcgctgccatttcccaccgtttgccggtttccaggtcgtcgaaagccgtagttattacggcaagggttatcaggatgtcgcacaccggaaacccagtatcgacaatgccaggcgctgtctgggctgggagccgtctattgcgatgcgtgatacggttgaagaaacgctggacttctttctgcgtagcgtcgatatcgcggaacgcgcatcatgacgaaagtcggtttacgcattgacgttgataccttgcgaggaacgcgtgaaggtgttccccggctgctggcgacattgcatcgccacggcgttcaggccagctttttcttcagcgtcgggccggacaatatgggacgccatctttggcgtctgataaaaccgcgatttttatggaaaatgctacgttcaaacgccgcttcgctctacggctgggatatcctgctggccggtaccgcctggccgggaaaaaatatcggcaacgctaatgccgggattattcgtgaaacggcaacataccatgagacgggactacatgcctgggatcaccatgcgtggcagactcacagcggccactggagtatccgccagcttgaagaagatattgcgcgcggcataacggcgcttgaggccattatcggaaaacccgtcacctgctcagccgcggccggctggcgagcggatgggcgcgttgttcgtgcgaaggagtcgttcaacctgaggtataacagcgattgccgtggaaccaccttattccgtccgctactgatgccgggccagacagggacgccgcaaatcccggtcaccttacccacgtgggatgaggttatcggccccgccgttcaggcgcagtcgttcaatacctggattatttcccgtatgttgcaggacaaaggcacgccggtatataccatccatgcggaagtagaaggtattgtccatcagccgctgtttgaagatttgctcgttcgtgcacgcgatgcggggatcaccttttgtcctctgggcgaactgctgccggcatcgcctgagtctctgccgttggggcaaattgtacgtggacacatccctggccgtgaaggttggctggggtgtcaacaggcagcgagcgcctcatgatgaaatcgatacgctattatctggctttcgccgcgtttatcgcgctctactatgttattcctgtcaacagccgcctgctctggcagccggatgaaacgcgctatgccgaaataagtcgggagatgctggcgtctggcgactggatcgtgccgcattttctgggattacgttattttgaaaaaccgatagccggttactggataaacagtctgggtcagtggctttttggcgctaccaattttggcgtgcgggctggcgctattttaacgacattgctggccgcagcgctggtggcatggctgacgttccgcttatggcgggataaacgtaccgcgttgctcgcctccgttatctttctctccctctttgccgtttacagtatcgggacgtatgcggtactcgacccgatgatcgccctttggcttacggccgggatgtgttgtttctggcaggggatgcaggccacgacccgaatgggcaagattgggatgtttttgctactgggcgcaacctgcggtctgggtgtattaactaaaggcttcctcgccctggccgtacctgtggtgagcgtgctgccgtgggtcattgtccagaaacgctggaaggactttttgctttacggctggctggcggtcttgagctgctttgtggttgtccttccctgggcgatcgccattgcgcggcgcgaagccgatttctggcattactttttctgggtggagcatatccagcgattcgccatgagcgatgcccagcataaggcccctttctggtactatctgccggtactgctcgcgggaagtttaccgtggctggggttactgcctggcgcgcttaaactgggctggcgcgagcgaaacggcgcattctatttgctcggatggacgatcatgccgcttctctttttcagcattgcgaaagggaaactgcccacctatgttctttcctgtttcgcaccgatagcgatactcatggcgcgcttcgtcctgcataacgtaaaagaaggcgtcgccgcgctacgtgtcaacggcgggatcaacctggtgttcgggttagtcgggatcgtcgcagcgtttgtcgtctcctcatggggcccgctgaaatcgccggtgtggacgcatatcgaaacctataaagttttttgcgtctggggcgtctttactgtttgggcgtttgtgggctggtatagcctctgtcatagccaaaaatacctattacccgcgttttgtccgctgggactggcgctgctgttcggcttttccatccccgacagggtgatggagtccaaacagccacagttttttgtcgaaatgacccaggcgcctttggcatcaagccgctatattcttgccgacaacgtgggcgtcgccgccgggctggcctggagtctgaaacgagacgatattatgctctacggacacgcgggcgaactcaggtatggtcttagctatcctgatgtgcaggataaattcgttaaagccgacgattttaacgcctggctcaaccagcatcgtcaggagggcattattacgctagtactttcaatagccaaagatgaagacatcagcgctctttcccttccccctgcggacaatattgattatcaggggcgtctggtgttaattcagtatcggcctaaatgatcggcgtcgttctggtgcttgccagtctgctcagcgttggcggtcagctctgccagaagcaagcgacacggccattgacggcgggcggacgccgccgtcacctgatgctgtggctgggcctggcgctgatatgcatgggcgcagcgatggtgctgtggctgctggtgctacaaaccctgccggtgggaattgcttacccgatgttgagtctgaattttgtctgggtcacgctggcggcctggaaaatctggcatgaacaggttccgccccgccactggttgggcgtcgcattgattatcagcggcattatcattctggggagtgcggcataatgggcgtaatgtggggactgataagcgttgcgattgcctccctcgcccagttgagtttaggattcgccatgatgcgactgccatcgatagcgcatccactggcgtttatttccgggctgggcgcatttaatgccgcgaccctggcgctattcgccggtttggcggggtatctggtttccgtcttctgctggcagaaaacattacacacgctcgcgctcagcaaagcctatgcgctactgagtctcagctatgtgcttgtctgggtagcctcaatgctgttacccggtttgcaaggcgctttcagcctaaaagcgatgctcggcgtattgtgtattatggcgggggtaatgctgatttttctgcccgccagatcatgatggcttgcgcgtcaaccgctgccattcgtcgcaggaataacagcgtgcatcaacgatttttaaggtctggtgtttttcccgattaatacaatactgcgcatcctgtaaaggcgacaggatatcgccgggactcagtaatatcatggaattcgcctcggcgatcatttttagcgaaccgccgctatcgcacagcaccagaacatggcacgccctctttttgacataatgcgatttcttaaccaaccattccatagcgcccccgtttcacgctgattgttcataacacgttacacatcaacggataaacaaaacggcaatagcgatggaatggttgtatattaacctaacattaatttttacagttctcacacacccactgctggagcgcacggcgagatattttaatccctccgtttttcagttctgacggcatcgtcaaccagcgaaccggctgttgaaaacgcgccagcttatcacgaacccattcagcgaggttcacgtctccggcctgcgatgcatactccacaaccgcaacgggacgatgaccaaactctttatcttctaccggcacgacgaaggcttgttgcaccagcggatgcgcattaataacgcgttcgacttcctccggctgaatgccttcgccgccgctaaagaacaggttgtccagccgcccggcgatggttagcctgccgtggttcagctcgccgcgatcgcgcgtggcaaaccagccttcgtcattaaccagcgggatcagtttgccatcacgccagtaaccttccgccatactggcggcgcgcagccagacttcattatcgacgattctgatctctctgccgggaagcggcgcgccaacatcatccgaaccatcggcctctttggcgcataccgtagacgcgaactccgtgagcccatacccgcaccagcagcgaatcccttgtttgctggcctggtcggtgagttcaaccggaatcaccgcgccgccgagcaaaacggctttcagcgtcaccgccgcccgattcgccagcagccgccacagctgcgtcggcaccagcgaagcatgagtacaccctgccagcatctgctccagcggttgcttatcgcgtaccgtcatgcgcgccccggcgaagagccaacgccacataataccctgcccggatacatgaaacagcggcagcgatagcagccagtcatcctgagggccaaacggcattagcgaaagcaccccctgcgcgctggcaagatgcgcctggcacgtatgtacagccgcttttggcaatcctgtggaacccgatgtcagcgtcatggaaaccagacgctgcggttgccaggccacagcatacgccgctgtactcttttgtatctgcaacgcggttaatccagaaaacgcattttcgccttccagtgtcagcgcaaaacgcagcgttaacttcggcaccagcgcctccagcaatgtctggggcaactgcgggttgacgggcagaacccgcgcgccgcactgcatcagcgcaagccatgccaacagagtgcgcggctgattcccggcgcgcagcaggacaccatcgccctcgcgtacgccctgcgcggcaaacccgcccgccagcacatcaatacgctcacagagggcgcgccagcttagcacttcatcgttcaggcgcagagcgggcgcctgactgcgaacctgacgccagtggcgccacggccaatccgtgaatgtcataacagtcgttccagctcctcacgcttcagacaaggcaacgcgctaccgggccaggggcgaatctgttgcgcctgcatcagatgcaaggtatccagtccaggcagcgttcccggcgtcaaccaggcggcaatccgcgccagttgcgtcaggccgaggctggactcgatcgaagagctgatgaccgccgtcagtcccaacgcatgggcggcagcgacttgctcacgcactttatcaagcgatccggtcagcgtaggtttgataaccacagccctgacgccctcttcggcttcaaaggtgaaatccgcttcgcgcagactttcgtcccaggcaatcgcgatgccggtttcacgggcaaaggcgcgggaatcatcccgcgtcttacacggttcttcgagaaaggcgatacgagcgcggtaatccggattaacatactttgcaaactgttgggcttttagcggcgtccaggcgcgattcgcatccagacgcagatgcagatccgggatcgcctccagcagcaaattaaccaccatgccgtcgcgtaccgcttcataaagacccactttgaccttagcgattttctcgccgggcatatcggcaagccgcagcaccaaatcgtcaggatcgccagtgcataacggcgcggcgcgatagtccgccgcctccggcaagacgccagtcagttccgccagcgcgcagcttgcgccaaacgcgaccgaaggcatctcgggtaatccctcgctcccctgaagccagtcgttcacccatgttagtagcgccgtctgcgcctcttcccacgtttcctgactgaagcccggcagcggagagatctctccccatccctcacgctcgccgtcacgcagacaaacatacagcccgtcgcgagtttttaaccgcctgtcgcgcagaaccacccccgcgtccatggggatctgccagcggtatacctgcgcgctacgcattatgggttccgtttgaatttgctgaagtcaggctgacgcttctggttaaaggcgttacggccttcctgcccttcttccgtcatgtagaacagcatggtagcgttgcccgccagctcctgcagcccggcctgaccgtcacaatcggcattcagcgccgctttcaggcaacgcagcgccatcggactgttttgcaacatttcgcggcaccagcgcacggtctctttttccagatccgccagcggaacgacggtgttaaccagccccatgtccagcgcctgttgcgcatcgtactggcggcacaggaaccagatttcacgcgctttcttctgaccaacgatacgcgccatatacgaagcgccccagccgccgtcaaaggagccaactttcggaccagtctggccgaagatggcgttttccgccgcgatggtcaggtcacacatcatgtgcagcacatgaccaccgccgatggaatatcccgcgaccatcgcgacaaccggttttggacaggtgcgaatctggcgctggaaatccagcacgttcaggtgatgcacgccggagtcatcctgataaccgccgtaatcgccgcgcaccttctggtcgccgcccgcgcaaaacgctttatcgccttcgccggtcagaataatcacacccacgttgtcgtcgtaacgggcatccgccagcgcctgaatcatctctttgacggtcaacggacgaaatgcattgcgcacctgcggacgattaatggtgatttttgcaataccgtcggtggatttttcataacgaatgtcggtgtaaccctccgagcagtcgtgccattctaccggtgcgtaaagcattgtttcatcaggatagatcatagtgtgtcctttagtcagagacgcagaatctgagccagactgtctaccacgccagcggggttttcccgatgcgcgttgtgtccggcgttacgaatgacatggcatgtcgccgccacttcctgcgccagggcgcggaatttgctgtcgcgttcgccacataaataataaaacggaaatgccagcgcgttgagcgcctcgcgtaaatccggctggacggcaagcgatgtcgcctccagcatcgcagccagcgtttcgccgttattctggctacgcagcgccgttagcgcctgtctttgctgcgccgtcagcgaggcgaacaccggctgctgataccagtcgtgaaaaacctcagtcaatggttcatgacgaaaacgctctgcccagcgcccgtcggacaatcgtctttcagcgcgcgcctgttcattttgcagccccggatgaccgccttcaaccaccaggccgcacaggccgggtattccctggcaggctgccatcatcgccacccggccgccaagagagtatcccaccaaccaaaactttagtatgttgtaactaattaacgtagcgcgcagcaatctgatgacatcggcaaatccgtcgaccggaatagccgcagatccgccatgtcccggtaagtcaatatagagccgcgaacagccgtgaaactgttcgccaaccggctgccattcgtggcaatcgccagaaaaaccgtgcaggaaaaccagcgagggcgtcccaggctgtccgggcatgtgctgcgcgtgcaacatcatagatggcttacctgagccaaaagttgctgcaacgtctgcgcgccgtccgtatcgtttaccaccagctcaatcaccgttgtcgccggggttcgccacgcgccagccagcgcagactccagttcttcccagttttccgggcgatgatagcgcaggttaaacatggcggccgcatggtcaaaatggacgttttgcggcatcaaataaaagcgctcacgtttgctttgcggcgtcggcagcagggagaagatttgcccgccgttattgttgaccacaatcaacacaaacggcgcggatacctgacgtagtaacgccagcgcgttaagatcgtacagcgcggataaatcgccgacgatagccagcgtcgatttagcgctggcgcgctgcacgcccgccgccgtggaaagcaggccgtcaatgccgctcgccccgcgattgctgtataccggatagccagccggcaactgtgacagcgcgtcgatcagacgcaccaccagactattgcccacgaacaattgcccctgctccggcagatagtcgcggatacggtgcgccagctgcgcttcgccaaaggtgtctcgctgcgcgaccacccgttgccacgccagttccgccagacgcgggatctctacacaccacggtttacgtttttccgccggatgcagttccagccaatcggcgattttcgctaccagtctgcgtccacgatggtgcgccgggtccagacgaccttcaatattgtcgattacccagtactcttccggctcgcaggttgcctgccattgcagtaagcgttttccggtaaggctactgccaagctggacgacaatctgcgcctgctgcagttcggtcaccgctttggcgttgccgagccacaggtcggcgcacggcagcggctgcccggtttgcgacaatacgtcgccaattaatggccatcccagagtttgcgcccactgcgccacttttttgccttcttccgcgctcatacgcccggcgacgacaacgccgcgtttttgtcgccagaagaaccagtcgcgctgtttgtcgctttccagtcgacgcgcttcgcgcagccagggtttttcatcctgccaccagtcgccgagacgctgctgccagaccagaccggtatcattcatatcgccatacagcggttcggcaaaaggacagttaatgtgcagcgcgcccgcatgaagcatggcgagcgcattgtcgatggtcgacaccagccagcgcgccggaatatcctgcgtgggacgcggcaacgacaaagtttgggaggggtgcgaggcaaacatccccgcctgacggatcgcctggttggcgccgcagtcaatcagctctggcgggcgatcggcggtaagtaaaatgagcttctcgcccgtcagccccgcctcaatcaacgccggatagaggttcgccacggcggtacctgaagtgacaataacggcaaccggctgttggctgactttcgccagccctaacgccagatgaccaagcccacgctcatcaaagtgcgtatggtgaataaaagcaggattctctgccgccgccaacgtgagcggcgtggaacgggaaccaggggcgatacaaacatgcctgacgccatgacgggttaaggcttccaggatgaccgccgcccagcgccggttaaatgcacttactgacatgagtttgtccggtatcaatcattgggactaagtataaagagctgcaaaaatggattattgatatgggtcgggaatatgtgactcattacgcatccatctgcaataaggtacgtaacccggccgctttattatctatttcctgccattcctgttccggatcggagccgcggacgattcccgcgccggcatacaatcgcaccacattggccgtcactttggctgaacgtaacgtcacgcaaaactcactttgccgcgtggagagatagcctgccgacccggcataccattcacgttcgaacggctcatgttgttctataaaacaacgcgcgggttcacgagggatcccggcgaccgctgcggtaggctgtaactggtgcaggcagagcgtgtcgtccgcctgattaagcgccgtccagatacagcggcgcaaatgctgtaccttgcgcagtctgagcacctgcggcggcagcacatccagcgagtgggtgcagttttgcagtcgctggcagatgtcttcgacaaccagcatattttctcgctggtttttatcgtctttcattaaccattcgccaagctgccaggctttatggttatccggatggttcgccaccgtcccggccagcgcttcggtacgcagcgccgtttcacgccgccgccagagccgctccggcgatgatcccagaaaggcggtatcggcggaaaaggccataaaaaagtggtagcagttgagatttaaacgacgactggacgccatcatcgcggcggcattgaccggacgggagaattgtaagtcggtggcccgcgccagcacaactttatcaaacgcctcttgcgcaatggtgtgggtggcctgctgaatcagcttcacccaaccgtctttgtccggccagtgttgttcgctcgtgagcgaaaggcgtagcgccggaacaggcttaatgccgaccagagaagcgagaaacgctttcgcctggcgcgcatcatcgcgtagcgaaacgtcactgtgcagatgtaagcgtaaggtcgccgtaccaccgctacgtcgccactccagccgcggcagcaataagtagccctctttcggctcgaacgcattcagcccccaaatacgcaggtcaggctgcgcgtgctgacgtaaaaaccgttgcgccagatcgagcgatgaaaatacggtgatggccccgagaacggcagcttcttcgtcgccattgcgctgttgccagtagaattgcggaaaggatgactggctggccagccagctcaatgcatcgaaggcatcgtttaaagggaaaggcgcatcgaaaacgcaaagccctggcgtcgccggtatctcttgcgatagctgacgcgtcagattttccagcgcagtagtaatagaatgcacgcggaccctccctgttaaaaaccccacattatacggggtactgccctaaaaaagcagtacctcatttagggagggttgcaattctgttcagtggggggatttagcgccgcgccagcagcagtccaagcaccagtcctaccgccgcgcctacgccaataccctgccagggtttttcatgaacgtagtcatccgctttataaacggcctgctttgcccggtaataatagctatccgacgcatggcttacgcggtttttcacctcttccagcgcttgttccgcgcgggctttcagctcaatgtatttttgatcggcgggatcgcctgaggaacgtaaaacctcttccagcgtttcgctgagcaaagtcagatcatcatcaacacgtgattcaccaaattgatatgacattctcattctccgttgtgttaacacctgctcctaactatagtcaacggtttcggtttatgcctgatgaacctcccgcgccattccccggtgcggaatgccgtcttcgtcataaacatcggtgacgggaataaaaccaaaccgcgcataaaaaggttgcagatgcgcctgcgcccccagatatagcggcttatccggccagtgccgcccacaagattccagcgttttcgccattaattgctggcccagtttcgcccctcgccaggcatcgctgacgatcacccggccaatgacaaccgggtctgattcgttatcgcttttcagaatcctcgcatacgccaccagttcatcctgatgccagcccagaatatgccgattgtcgccgactaaatcatcgccatccacatccaggtaaggacagcgctgttctaccacaaagaccgcgcagcgcaatttgagtaacgcgtaaagttgaggaacggtaagttcgctatggtggagatcctgccagtcaatcatgatgcgctcctgtgttgtggtaatcttgggttaaacgataaccaaacgtgtatggacaagatggaattaattttttaggtacgtccgcaggcgttcccacgcgctcacgcaatgtaacggcaattttattacatctgcaacatccaacgcagccgggagtatggctttttgattgcggcgaagggacacagcatcaaatgcttaataccgcgtttcatcccggtaagcttgagcgcatttttatcagccatcttcacggcgatcatttgtttggcctgccgggtctgctatgcagccggtcgatggcggggaacccccatccgctaaccgtatacggacctcaaggcgtgcgtgagtttattgcaaccacactgcgtcttagcggttcatggaccgattttccgttgcaaattgaagaaattagcgcaggtgatattcttgacgacggtctgcgtaaagtgaccgcgttcaggctggagcatccactggagtgctacggatatcgcgttgttgaacatgacaagcctggcgcgctgaatgccagggcgttaaaagccgcaggcgttacgcccggcccgctgtttcaggcgttgaaggcaggaaaaaccgtcacgcttgccgatggaaggcagatcaatggcgccgactaccttgctcccgccgtggccgggaaatcagtggcgattttcggcgataccgcgccctgcgaggccgccctcgcgctggcgcagggtgtggatgtgatggttcatgaaaccacgctggatgcgtcaatggaggagaaagccaacgctcgcggacacagctccacccgtcaaaccgcgacgctggcgcgggaagctgccgttggtcggctaatcatgacccatattagctcacgctatgacgataaaggctgtcagcgcttactggcggaatgccgcgctattttcccggcgacggagctggcttacgatttttctgttttcccggtttagcgctccattttttgtcctcattgccgataacactaaaaaaggcaggctttcataatgaggttaggatggacaattttcagaaagatattgatgacagggccaatttaaccctgtccaaccgttttgaactgctgttattccgtcttggtacatcgctgcatgaacagaagtcagagctgttcggcatcaatgtatttaagctgcgcgaaatcgtaccaatgcccgcctttacgcgcccggcaggcatgaaagcgccgctattgggcatggtcaatattcgggatcaggtcattccggtgattgatttgccagcggtagcgggctgcaagccggaaaccgggctgaatattttgctgatcaccgaatatgcgcgcagcgtacaggcatttgccgtcgagtcggtggaaaatattatgcgtcttgactggcaacaggtgcataccgccgagaaagccgtcaacggtcgctacatcaccagtattgcctgcctggatgacaacaaagaaaccaacaacctggcgctggtgctcgacgttgagcagatcctttatgatattgtcccctccagccacgatctgcgcgccaccaatctgaagaccaataaattttatattaccccaggcgcggtagccattgtggcggaagactccaaagtcgcccgcgcgatgctggaaaaagggctgaacgcgatgggaattccgcatcagatgcatgtgaccggcaaggatgcctgggagagaatccagcaactggcgcaggaagcggaggccgaaggtaagccaattagcgagaaaatcgcgctggtcctgacagatcttgagatgccggagatggatggctttacgttaacgcgtaaaattaaaaccgatgaacggctgaaaaagatcccggtcgttatccactcctcgctttccggcagcgccaatgaagatcatatacgtaaggtgaaggccgacggctacgtggctaagtttgagattaacgaactctcttcggtcattcaggaagtgctggagcgcgcagcaacaaacagccagggaccactgatcagccgcaaaagcgcctgacgtaacaggggatgcctacagtacaggcatcccctgacgcttagtgagacaagccttccgccagttttaccagtttaataaactccgcgcgatagccttgtctatcttccccgcgcgcctgttcaccccatttaataatttgcggccaggtcgtatctgccagcgtttctgagccacgcagtttttgcccgaaagccgctaccgccgcgcggaaacgaaaatcttcagaggcgtcagcaaagatcggcatctttcccataacgaccgggaactcggctaatgtactttcgctgccctgcggcgctttccagcgcaatttgagccacgccagctcgcttgattttgttgtctttgaggcggctttgttctgagcgtagcgcagtttatccaccgaggctttctgcccgttaagcgtcagttcaaagaatagcgtgacgtgtttacccgcgccgatatcaccggcatcaaccttatcgttattgaaatcctcgtcgcgcagttggcgtttttcataaccaatctgccggtactcagtcacccactgcggattaaattcgatttgcgattttacatctttggcaacggtgaccagcgtttgatgcatctcatccttgaggactttttgcgcctcagagagggagtcgatgtagctgtaattgccgttacccacatcagcaattctcaccatcatggcttcgttgaaattgtcatcgccgacgcccagcgtagataaggtaatacctttctcgcgctctttttttaccagcgcttcgatgtctttgggatcggtaataccgaggttaaaatcaccgtcggtggtcaacaaaatgcggttaacgccgcctttgataaaccctttttcggcctgctcgtaggctagtcgtaatcccgcttcaccaccggtactcccgtaagcatccagattatcaattgccgctttaatcgcggttgtgttatttcccgctgtagacgccagcgcgacgtgagtgccgcccgcgtaggtcacaatcgtgatgttatcctgcgcacgcagatcgttcaccaacagttttagcgccgaccggatcaacggcaggcgttccgctggctgcatagagccggaagtatcaatgagaaaaaccaggttggcaggtggtagatctctggtctgcatgtcccgggcctgaacatcaacttttaatagcgtacgctgcgcgttccacggcgagggagccagttcgtatttaaccgcaaatggcatcggtatacaggccgcaatgggtttagtgttatcctgcttatccgcaacgggctgaggggcgggaaagtagttgagcatctcttctacccgcacggcttccggcggcggcagttgtccctgattcagaaagcgccgcacgttagcgtagctgccagtgtctacatccagactaaacgtggcgagcggcgcctgacttacctgtttaatcggattttcatcgtagtgttcgtaacgcgcggtccccattacattaccgccttgtgcagcgaacgcttttggtgccgcggcacgtgtctgcattacatattgcggtgcttcggctgttgccagagatgccgctttggcatctgccagggctttggcttcagcatattcggctgcttttttcgcagcctgttgggcggcctcggcttgtcttttctggacagtgtcatccccggcctgagcgctattttctttctggatagtccgcttctgttttaactcagccggattatttccctgcgggtcggagggctccggcccacagcccgagagaataaccccacccaacaacagcattaatgtttttccgttaagcatacaaattccttttcaattatattcgggtaattctctgcagatgtcctgcattatattccgcgttacttttattatcagcatgacgaaagtagaaaataattttacctgcgttaatagccaccaataataaaaaagataattatatttttgaggtaaataatatttacgtttaagatgaacggcttaatcagttgctggcgttcgacccacagattctgcgtgaagaacactatttacaggtgaccgatttaccaaaagtgaatatataagatgggggactatctgcactgtgccctcgccgatacttccttttacaacccaccaaacagcaatccattaagccgtgccgacactcacgttattgatggaaagatattatatgctgccgtcacatgaaataatgaactgagcgcgatcggacgccttgaaaaacgctgacagaaatacgcttcagatcaaatttttcccattgaagtcgatgagataaacatttatccgggaaacgggtcacgaaaacagttgggagagttgttccactgcctgatgcaagaaatggacaaactgctgagtttttatcagcgatgcctgagaaatgacagtcacgttataatttttatagcggagtaatgggccatatgtttaacacttcgacaattattgtgaattacccatatgaaaccgctggcgcttacggaaccgcccaacatccggctcttcgttcgtcgggacgtgttgggtttcggctacgcctcacccaacgagtctatggtctctatgcgtcacaggttttcataagttggatgcaatccaacatttagaggctcaggtattgctcatcagcctcaaccgccgataaatcggcggttattgacatcatcaacgcggcattacatcagcggcatcgccagttgcacaaggctaatcagcggctgcggccagacgcccagtaccaacaccagcaacgcggagatcagcaccacgataccgcctgcgctgtactgccagtttgtcggcgcgtcgcgtcccggttgctgcggcgcgtgcaggtagagactcaccgcaacacgcaggtagtagtacaaaccaatcgcggaacccactaccacggcggcgaccagccaccacaggctggcctgaacgccgaccgccagcacgtagaatttgccgataaagcccagcgtcatcgggatacctgccagcgacagcatcatcaccgtcatcaccgcggcaagaaccgggcggtgccagaatagaccacggtaagagtacagagaatccgcatccgggccgcggaacgggctggacatcaggctgaccacgccaaacgcgccgaggctgctgaacagataaccggccagataaacgcctaccgcttccatcgacatctcgccgctctgcagggcaatcagcgccaccagcagatagccgaggtgagagatagaagagtaaccgagcagacgtttgatgttggtctggctcagcgccatcaggttaccgaagatgatagaggcaaaggcgataatgcccagcaccacgcgtaccgcttcgctgtcgcctaccggcgcatacaggaacagacgcatcaccacgccgaagatagcgattttgctcgccgtcgccaggaaggtagaaaccggcacaggcgcgccctggtaaacgtctggcgtccacaggtggaacggcaccagagagagtttaaagcccagaccgacaatcatcaggccaaagcccgccagcagcaacggctcgtgcagcataccatcgccgaggctcttaccgagcgcttcgaaagacaggttgccggactgcgcatagaccagcgccatcccgaacagcaggaaagacgaggcggcggcggagaggatggtgtatttgatactggcttccagcgagcgtttctggcggaaagcataaccaatcaggccgaacagcggcagtgagatcagttcaataccgaggaacagcgccgccagatggttggcgttcgccagcagaattccgcccaggctggcgattaacaccagcaggtagaactcttcctggttatcgttatagccttccagccacgggtaggcaaaggtacaggtggcgaggctcgccagcagcaccagtccggtgtagagcatcgcaaagccgtcaacgcgcatcagcggcgtgacgtccattgccccggcctggccgacaaaccaaagcgaaaccagagcagcgttaagcccaatgaccgacagcgtggcattgaggaagtgattgcgtcgccacgcaatggagagcatcacaaccaccaccgtcaagccgacgatcagcagcggtagcagcgcaatcaggtgttgtggagttattgtcatggcgatttacggccttgtagtagtaacggaattaacaaaccactgctggatgttgctcatcgcagaatgcgaggtatccagaatcggctgcggatagaagccaagcagtaccagaagcaccaccagcaacagaatgataaacagctcgcgcagcgacatccctggcagttctacactggcaatctggctcttcgccttaccaaagtaagcgcgatgcagcatcgccagcgagtatacagaggcgaataccagcccaaaggtggagatcacggtaatcaccggcaccacctggtagctgccgaacagaatcataaattcgccgacaaagttaccggtgcccggcatcccgagcgtcgccaccgcaaagaacatggacagcgcaggcaaccatttcattttgccccacaggccgcccatcatacgcatgtcacgcgtatgcagacgttcgtacaactggccacacagaatgaacagacccgccgcggacaaaccgtgcgcaatcatctgaatcaccgcgccctggtacgccagctgactgccggtgtagatagcgatcagcacgaagcccatgtgggaaacggaggtataggcaatcaggcgcttgatgtcgtattgggtaaaggccatccacgcgccgtagaaaatgccgataacgccaagccacatagcgataggcgcaaactccgccgacgcgttcgggaacaatggcagggagaaacgcagcagaccgtaagcggcggttttcagcaagatccccgccaggtcgacggaaccggcggtcggcgcctgggagtgcgcatccggcagccagccatgcagcggaaccaccggcattttcaccgcgaaggcgatgaagaagcccagcatcagcagatattccacaccgtgggacatcggcgtattcagcagctcttcataattgaaggtccacacgccggtcgcgttgtagtgcacaaagaccagcgccaggatggcaatcaacatcaccagaccactcgcctgggtgtagatgaagaacttggtcgccgccgtgatacgcgttttcccgtcagaagctttgtggccccacagcgcgatcaggaagtacatcggcaccagcatcatttcccagaagaagaaaaacaggaacatgtcgatggccaggaacacgccgataacgccgcctaagatccacatcaggttcaggtggaagaagccctgatatttttcgatttctcgccaggagcaaagcaccgccagaacgccgagcaggccggtcagcaccaccattagcagcgacagtccgtcgagcgccagatggatagagatgccaaaacgcgggatccacggcaggacaaattcagattgccactgcggaataccggcggattgcgtcagtgaatagccgccctgcaaccacaattgcagaccgagcgccagcgtcagccccatggtaatcagcgctatccagcgcggcaccttcacgccaaagcgttcggtctgccagcacagaaagccgccgataaaggggattaatatcaaccagggtaataacatagctaagtatgtcccttatatttactcctgctcaggctatctcactcgtcagcccaaatcctgccagtgctcacacaaaacgcagcgcgttttgaacgtccgtaaggacggccccgtaggggtgagcttcgcgaatcatcctcacgtacttcagtacgctccggttgctgtgcgctggcggtatccggtctgacttcgccgatgacgcctgtacttcaggaacagattttcaacgaattctaaaaattatttttgggtttgtaggccggataagcactgcgccatccggcagtcgttcatccagccaacaaactcaacgcagtaccatcaacagtgccagcacaacgacagcgccgatgctcatggatgccacataccagcgcaaataaccgttctcgctcagtaccaggcctttgcctgcaaaacgggaaaggatagccggaatgttcatcaacgcattaagcgggtcgcgcttcagcagccaggcgataccgaggaatggcttgacgaatactttgtcgtacagccagtcaaagccccaggcgttataccaccaggtgcccagcagacggcccggcgcgctgttggcgatcgacgtcaccagcgtacgtttacccagccacagccatgcggcaatcagaatgccggcaatcgccactacgccagaggtaatttccagcgtcatgacgcgaccatgcgccagttcagttgtctgcggcagcaccccctgcagcggcggcacaatcagcgcgccaacaaaggtagacagaatcatcaggacaatcagcggcagatggtgggtaatccccttccctgcatgagcatgaatttgttctttaccgtggaatacgatgaaaatcatccggaaggtgtacagggaggtcatgaacgcgccgaccagacccgccaccatcagattgatatgaccgttcgccatcgccccggccagaatctcatccttactgaagaagcccgcagtgaccagcggcagcgccgacagcgccgcgccccccaccaggaagcaggcatacaccagcggaatggacttacgcagaccgcccatcttaaagatgttctgttcgtgatggcaggccagaatgacggaaccggacgccaggaacagcagcgctttgaagaacgcatgggtcatcagatggaaaatcgccgcatcccacgcctgtacgccaagcgccaggaacatgtagccaatctggctcatggtggaataggccagcacgcgtttgatgtcggtctgcaccagcgcggcgaaacctgccattaccagcgtaatcgccccgataatgcccaccagatgcagaatttccggggtcatcaggaacagaccatgggtacgagcgatcaggtagacaccggcggtcaccatggtggcggcgtggatcagcgcggagaccggcgtcggaccggccatcgcgtcggcaagccaggtctgcaacggtagctgcgcagatttaccgaccgcgccgcccagcagcatcagcgtcgcccacatcagcatgttgttgccgtcagcaaagtgcgctggcgccagctcgaccatttcgcggaagttcagcgtgcccagttcgttgtagaggatgaacagcgcgaaggcgaggaatacgtcaccgacacgggtcaccacgaaggctttcattgccgccgcgccattcttcggatcgctgtaatagaagccgatcaacagataagagcacaggcccacgccttcccagccgaggtacatcaacagcaggttatcggacagcaccagaaccaccatgctggcgataaacaggttggtataagcgaagaagcgggagtagccctcttctccacgcatgtaccaggacgcgaacatgtggatcaggaagccgacgccggtgaccacagagagcatggtcagcgacaggccgtccagcaccaggttaaaaccgatgttaaagttaccgaccgacatccacgtccacagcggctggctgaacgcctgtttgccgttggcgaagaaatccatcccgacaaacgctgtcaccaacgccgccagaccaacggagcccacgccaatggtcgcggagagattttccgaccagcgtccgcgagagaacgccagcagtacaaagccaatcaatggcagaataatggttaaggcaagcatgttcatccacgcatctcacttactgaatcgatgttcaggttctggcgacggcgatggagttgcagcaacagcgcaagtccaatactcgcttccgcagccgcaaggctgatggcgagaatgtacatcacctgaccatcggtctggccccagtagctcccggcgaccacaaaggccagcgcggaggcgttaatcatgatttccagcccaatcagcataaacagcagattgcggcggataaccagaccggttaaacccaggacgaataaaatcgcagcgaggatcagtccgtgtgttaaggggatcatgcgcgctcctccgtttttcttttcgcgcggtcatcggcgcggttgcttagcacttcgcccgcacgctcttcacgaccgacgtggaacgccaccaccaggcctgccagcagcagcatagacgccagttcgaccgccagaacataaggcccgaacagcgtaatgcccaccgctttcgcgctaatcggcgtgccgtcgatgccctggtcgttaacgcccagaatggcgtacacaatgaccgccagcataatggccgacaaaaccgccggaccaatccacacctgcggcttcagccactggcgttcctgttcgatttcgctgccgccgaggttgagcatcatcaccacgaacacaaacagcaccatgatggcgcctgcgtagacgataatttccagcgcaccggcaaagtaagcgcccagcgaaaagaacaccccggaaatcgccagtagcgatatcaccagatacaacagcgcgtgtaccggattggtatgggtgatcactcgcagggtcgcgaggatggctatcaggccacagatataaaaagcgaattccattgccctctccttacggtaacaggctcttgacgtcgataggcttggcttcgttctctgcttcgcctttatctttgccgtcgattgccatacccgccatccggtagaagttatattccgggtatttgcccggaccggaaatcagcagatcctctttttcgtacaccagatcctgacgtttgtattcgcccagttcgaagtccggggtcaactgaatcgccgtggtcgggcacgcttcttcgcacaggccgcagaagatgcagcgtgagaagttaatgcggaaaaattccggataccagcggccatctttggtctccgctttttgcagagagatacagcctaccggacaggctaccgcgcacaggttacaggcaacgcagcgctcttcaccgtccgggtcgcgcgtgagcacgatacgaccacggtaacggggcggtaaatagaccggctcttccggatacatccgcgtttcgcgtttggcgaacgcatgcaggccgatcatccagatactgcgtacctgagtgccgaaacctactaataattcttttaaggtcatggtctttgtgtcccttattgcgcctgccacagaatgacagccgccgttaccagcaagttgatgagcgtcagcggcaggcaaactttccagccgaaggacattacctggtcataacgcggacgcggtaacgacgcacgaatcaaaatgaacatcatcatgaagaacgcggttttcagcgcgaaccagacgaatggcggtaagaacgggccatgccagccaccgaagaacagcgttaccatcagcgcggaaacggtgacgatgccgatgtactcccccacgaagaacagaccgaatttcatcccggaatattcgatgtggtaaccgtccgccagttcctgctcggcttccggctggtcaaacgggtgacggtgacagaccgctacgcccgcgatggcgaaagtaacaaacccaaagaattgcggaatcacgttccacagatgcgcctggttattgacgatatcggtcatattaaatgaaccggcctgcgccaccacgcccatcagggaaagaccaagaaacacttcgtagctcaccgtctgggcagacgcgcgcatcgcgcccagcagcgagtatttgttgttgctcgaccaaccggcgaacagcaccgcgtaaaccgccagaccggccatcatcaggaagaacaaaatcccgatgtttaaatcggccaccacccaattagggctaaccggcacaatggcgaaggagagcagcagcgaagtaaacgcgatcatcggcgccagggtaaagatgacgcgatccgagaatttcgggatccagtcttctttaaagaacatcttgatcatatccgcgaccagctggagcgagccgccccagccaacgcggtttggtccataacggttctggaacagacccagcagacgacgttcgccaaagctcatgaaggccccgcaggtgacgaccaccagcagaatcaccaccgctttgagaatgctcagcaggatctcaatcagatccggtgtaatccaactcattgttgcgcctcccgcagatcctcaagacgcgcgccagccagaaccggcgcgatgccaggcatacccatcggcagccctacctgccctgccgctaacccttcagagatttcaaccggcagcgtcaccgtattgccatcgtagctaaaggagacgcgcgtcccggcattgacgcccaacttcgcggcatccgccgggttaagtttgatatacggctgcggcatacggctctggaagaccggagaacgctgagacaattcgtcgctgccaaacaggtggtaatacggcgcaatacgccactgaccgtcctgcgcctggaagcttgccggcacggtagtgaaataatccagaccgccctcagtcgcttcaatcaaacgcacgcccggatcgccgtgacgcagtttgccgcccacttcatcctggaatttgttccacgcctgcggggagttccagcccggcgcccaggcgaacggaatttcagatcgcggggcagtcggttggttattcccttccattgagaaggcgaacatggtgtctttatcctgcggctgacgtggttcatgcacgctgatattggcgcgcatcgccgtacgaccgctgtaacgatgcggttcgcgcgccagcttctgcccacgaatgcggaaggtcgcatccggcgcggcgtccttaatgccggcaaattgcggcatggcggcaatgaccgcgtcgatcacgtggtcaagctgagtccagtccacttcgcggttttcgacggtgctgtgcagtgaatgcagccagcgccagctttccagcataatcgtcttgttatcgtagtaggccggatcataaacctggaagaagcgctgcgcgcggccttcgttgttgatgaccgtaccatcgctttcggcgaagcttgccgcggaaagcaccagatgcgcgttttccataatcgccgtgcgctgatggtcaaccaccatcaccagcggcgctttggcgagcgcagcgttcacgcgcgtagcgcttgcatgacggtggagatcgttttccagcaccaccacggcgtccgcgctgccggtttccagctcgcccaacgcatcatcaagcgaaccgccgcccatcatacccagccccatgctgttcacggagcgggcaatcatagtaataccgacgtcggcgccacggcctttcagcgctttcgccacgttggcggccgcctgaatcacctcactgctaccggcgttagtgccggagataatcagcggttttttcgcgccggccaacgcctgcacaatgacatcaattttgttttgtaagtcgctgtcgataccgtcaaccgcaggcgctgtattgtccagcgcatgagcaatcgcaaagcccaggcgcgcctgatcttccaccggcgcgcgataggtccaggcggcgatatcatccagacgggtgtcatccacgttggtcacgaacagcggatgtttggcacgctggccgatgttaaggatggccgcaatctgccagtcggccactttctgcgccgccgccatttcacgcgctttacctttcaccgcctggcgtaccgccagcgcaacgcgcgcgccggtctgagtgacatcctcacccaagaccagtaccgcgtcataagattcgatctcccgcagcgccggggtgtaaattccgccttcacgcagcactttcagcgccagttgcagacgttcctgctcgccgcgcgcgataccggtgtagaagttttccgcaccaaccagctcacgcagcgcaaagttgctctcaatgctggcgcgtggcgaaccgataccgatcactttcttcgactggcgcagaatatccgccgcgccctgcatcgcctgctcggcgttgagggtgatgaagtcatcgccacggcgctgaaccggctgacgcggacggtctttcaggttcacatagccatagccgaaacgaccgcggtcgcagaggaagtagtggttaacggtaccgttgtaacggttttcgatacggcgtaattcgccatagcgctcgcccgggctgatgttacagccgatggaacactgctgacagatgctcggcgcaaactgcatgtcccatttacggttgtaacgctcggagtgcgttttatcggtgaagacgccggtcgggcaaatctcgaccaggttaccggagaattcgctttccagcgtaccgtcttccggacgcccgaagtagacgttgtcatgcgcgccatagacgcccagatcggtgccgtcggcataatctttgtagtaacgcacacaacggtagcaggcgatgcagcggttcatttcgtgcgagatgaacggccccagatcctggttgcggtgggtacgtttggtgaaacggtagcgacggaaactgtgccccgtcatcacggtcatatcctgaagatggcagttaccgccctcttcacagaccggacagtcgtgcgggtggttagtcatcagccactccaccacgctttcacggaactgtttcgcttcttcgtcgtcaatagagataaaggtaccgtcggtggctggcgtcatacaggacatcaccaggcgaccacgcgtatcttccgcgttttggtattgcttcaccgcacactggcggcaagcaccgacgcttcccagcgccgggtgccagcaaaaatacggaatatcaaggccgagggacagacatgcctgtagcaggttgtccgcgccattgacctcgtattctttgccgtctacatgaatcgtagccattagcatgcttccaaattaaaaatcgttaactcaccagcgctctttgagcaggttcggctgaataccattgattaaatgggtattactgaacggctgcttgatgccagcttcgaattcttcgcggaaatacttaattgcgctttgcagtggctcaaccgcgcccggcgcatgcgcgcagaaggttttacccggtccgaggaaacgacacagttgctcaagtgtctcgatatcccccggctggccttcgccacgctccagcgcgcgcagaattttcacgctccacggcagcccgtcgcggcatggcgtacaccagccgcaggattcgcgggcaaagaactcttccaggttacgcaccagcgacaccatgccgatttcgtggtctaccgccatcgccagcgcggtgcccagacggctgcctgctttaccgatgctttcgaactccatcggcaggtcaagatgcgcctcggtcaggaagtcggttcccgccccgcccggctgccaggctttgaatttcaggccatcgcgcataccgccggcgtagtcttcgaggatctcgcgcgcggtggtgccgaacggtaattcccacaggcccggattcttcacgcggcccgagaagcccatcagcttggtacccgcatctttgcttttcgagatgttctggtaccactccacgccgttggcgaggattgccgggacgttacacaacgtttcgacgttattcacacaggtcggcttgccccatacgccggaggtcgccgggaaaggcggcttggagcgcgggttcgcacggcggccttcgagggagttaatcagcgccgtttcttcaccacagatgtaacgccctgccccggtgtggacaaacagttcaaagtcgaacccggtgcccatgatatttttgccaagcagcccggcctcggttgcttcggcaatcgcacggcgcagatgtacagccgcttcgatatattcgccgcgcaggaagatgtaaccacgatacgctttcagcgcgaacgcggagatcaacataccttccaccagcaggtgcggcagttgttccatcagcagacggtctttataggtgcccggttccatttcatcggcgttacacagcaggtaacggatgttcatggattcatctttcggcatcaggctccacttcagaccggtggaaaagcccgcgccgccgcgccctttcagaccggcgtcttttacctggctgacgatttcatccggagacaggccggtcagcgccttacgcgcgccttcgtagccgtttttgctacgatattcatccagccagaccggctgtttgtcatcgcgcagacgccaggtcagcggatgggtttcgggagtacggataacgtttttcatttataccgctccagtagttcaggaatggcttccggggtcagatggctgtgagtatcctcatcaatcatcatgttcggccctttatcgcaattccccaggcagcaggtcggcagcagcgtaaagcgaccatcaaaggtcgtctgccccggtttgatgttgagatttttttccagcgcggcctgaatcccctgatagccggtgatatggcacaccacgctgtcgcagtagcgaatcacgtggcgaccgaccggctgacggaagatctggctgtagaatgtggcgacgccttcgacgtcgctcgccggaatacccagcacatcggcaatagcgtagatcgcgccgtccggcacccagccacgctgcttctgaacaattttcagcgcttcaatggacgccgcacgcgggtcttcgtagtggtgcttctcgtgctctatcgcttcacgctctgccgcactcagctcaaaagcctcggtttgtggttgttgattctcgtgcataattagcggtccacatctgacataacaaaatcgatactacccagatagacaatcaggtcggagaccaggctaccgcggatcgccgagggaatctgctgcaagtgcgcaaagctcggcgtgcgcacgcgggtacggtagctcatagtgctgccgtcgctggtcaggtagtaactgttaatccccttcgtcgcttccaccatctggaaggactcctgcgccggcatcaccgggccccaggagacctgcaggaagtgggtgatcagggtttcgatatgttgcagcgtgcgctctttcggcggcggcgtggtcagcgggtgatccgctttgaacgggccttccggcatgttatcgaggcactgctgaagaatgcgcagactctggcgcagctcttccactttcagcatcacgcgggtatagcagtcggaaacgccgccacccaccggcacttcaaagtcaaagttttcgtagccagagtatggacgccatttacgtacgtcgaagtcgatcccggtcgcgcgcagccctgcgccggtggtgccccactccagcgcctctttcgcgccgtaagcggcaacgccctgcgaacgccctttcagaatagtgttacgcagcgcggctttctcgtaagaatccagacgcttcggcatccactcaaggaactctcgcagcaggcgatcccaaccgcgcggcaagtcgtgcgcgacgccgccgatacggaaccaggccgggtgcatacggaaaccggtaatggcttccaccaggtcataaattttctgccggtcggtaaaggcaaagaagaccggcgtcatcgcgccgacgtcctgaataaaggtcgagatgtacagcagatgactgttaatgcggaacagttcggagagcatcacgcggatgacgttcacacgatccgggacggtgatccctgccaacttttctaccgccagcacgtacggcatttcattgacgcaaccaccgaggtattcgatacggtcggtatagggaatgtagctatgccaggactggcgctcgcccattttttcggcgccgcggtggtgatagccgatatccggcacgcagtcgacgatttcttcaccgtcaagttgcaggataatacgaaacgcaccgtgcgcagacgggtggttcgggccgaggttgaggaacataaagtcctcgttgtcagtcccgcgcttcatcccccagtcttccggcttaaaggtcagcgcttccatttccagatcctgcttggctttggtcagctcaaacgggtcgaattcggtcgcgcgcgccggataatctttacgcagcggatggccttcccaggtttgcggcatcatgatgcgcgtcaggtgcgggtggccttcgatatcaataccaaacatctcccaggtctcacgctcgtaccagttggcgttagggaaaagtttagtgaaggtcggcacgcgcaggtcgttttcagacaacgccaccttgagcatgatatcgcgattacgctcaatggaaatcaggtggtagaaaacggaaaaatccgcggcgggtaacccgtcacggtgcgtacgcaggcgttcatccatgccgtgtaagtcaaacagcatgacgtaaggtttcggcagtttctttaagaaatcgccaacctccagtagttgttcacgcttgacccaaacaacggggataccggtgcgggtcgcctgaacggtaaaggcatccggcccaaaacggttgcgcagttcgccgataaccggatcatcaagatgatcgcgggtactccatgcagcgtcttgcgcggttaagtcggtcatattgttcaccattgcaaatggtccgtggtggtcggcagtgcttcgcgctattaaaatagtggttagcgaagtgaagtgctgctgccgacaggcgcaaattaaatctcgtccggggtacgcaggttcgtgacggcaatacgctcgccgcgtttacgttcgcgttctggctgcatattggcgcgatacacgccctgatcgcccaccacccatgagagcggacggcgctctttgccaatcgattcttgcagcagcatcaacgcctgcatatacgcttccggacgcggcggacagccagggatatacacatccaccgggatgaacttatcaacgccctgcactaccgaataaatatcgtacatgccgccggagttggcgcaggcgcccatagaaatgacccattttggctccagcatttggtcatacagacgctgaataaccggggccattttggtaaagcaggtaccggccaccaccatcaggtcagcctgacgtggcgacgcacgcagcacttccgcgccgaaacgggcaacgtcatgcactgcggtaaaagaggtcaccatctctacatagcagcaagaaaggccgaagttgtagggccaaattgagtttttacggccccagttaaccatgtcatgcagtttgcccatgaacacgtttttgttaacttcctgctccagggggtcggttacgatctcctgtttttgcagggggtaacggtcattctcaccgttaggatctatgcgggtgagcgtataatccatcttaatgcctcgcggttagcgttgacgattagcgatactgttcgtttccgggttcatacgctcgcggcgtgaacgcgcgggcgtccagtccaacgcgccaatacgcgccagataaaccagaccagccagtaacacaaaaataaaaattgcagcttccacaaagccaacccagccgctttcgcggatagaagtcgaccatgcgaacagatacagcgcttcaacgtcgaagataacgaagaacatggctaccaggtaaaacttggcagacaggcgtaagcgggcggtgccgaccgaatcgatacctgattcaaacggaacgttcttgtgcctcgcgcgtgcgcgaccgcccaaaaaccaaccgcctaccagcatcaggcagcacaggccaatggcaacgataagaaagatagcgaatgcccagtgatgagcgatgacttcagtggatgttgacatactcattgcttactcatcaaaagtagcgccagtttctctgctctttacggcagatgggcgccacatcgattcatggggaggaataaaaaaaaccctacaattactgtagaaaatgataaaaacagctaattgatgtggttttttactcctttctataaccttttgtcaactttaacaaaagttccttcacattaatttacatcaattcatcaccattaacattaagtgccatcctggagaaaatgactcttcgaccaggggggattttatgttgttgaatcgtgtccgttgtgaagcaaaagaaataacacacacctattttgacaggaatttgtgaagatgcctccccctaaatgggagtattttcttgatctgtgacacgcttttgttaattcaccccctaaaacagcaacaatttctctagttttttaacatgcaaattcataaaatggatgttctggttattttttgcccacattgaactgcgaatcgctactggctgatttaccgcaacttttacaatttgtgcggttaagcgcgtacagatgggcacaaaaaaagagccactgagcgttttttcatcgccagcggctcttttttacatttacgacttagcgccttttgcctgcgagctactcaaaacccccttccaccatcagcggatcatctccgccctctgcagaaaactggttgtaatgccatgggttttggtagctttccatcgcatggaaaatcaccatcgccagctcgttctggctattgggatcgcggcacaacagatattccgtatccggcaaaggcggtaatccgtctgcggcgcccagcacgcgaaggtcgggactcatcatttcgacaggtcgagccgttacgccaagaccggctttaacggccgcgcgtaccgccggtaatgtagacgccacataggccagccgccagggaatacccgctgcatttagcgtctccagcaccatatcgcggaatgggctgggatcgtccagcaggactagtggtacgggctctcccctttgcaaaacatactcagccgcacaataccaatgggtgggcgaggtccgcaaattcagacagtccagcgaatgaggttggttagtcgtcaccaccaaatctacttcctgcgatttaaccatgtccaccatataggcgttgcgttttacccgtacatcaagcgcgagtttcggataaaccgagctgattcggctaagcaaaaaaggcaggatagtatcagctgattcatcagaagcgccgattgttaacactccctgaagattactgaacattaatgatgaacacgcctcatcattaaaacgcaggatttttctggcgtaccccagaagctggataccgtgttcggtcaaaagtttgttacggccatggcgggcgaacaattcctttcccacgagttgctcaagacgctgcatttgctgactgaccgcagactgagtacgacataccgccgccgccgccgcggcgaaggtgttcagatcggcaacggccacgaacgttctcagcagatcgagatcgaggttaattatcggacgatttgcatttatcataatttttcacttactggcgggtcatatcgggctgacctggttaatgctgtgcattcagaaacaagcaattccatttgtaatgtgcatccttcgcagtaccgcctggttacccaggtaaatgttagaatgtaattgaaaatacgaccaaaacacttctcttacttactgatataataccaaatgcaactgatcgggatatatcaaagagaatgtgtcatacctttaggcgtctacagatttctgctaatgatggacgtgtaaatcttgtaacagcgtcaaatagtttaccgagacgcacagatacaaaaacaatatattgaacaataggttatgtataaaatcgcgtcatgataattagcagacaacgcagactacgcccccgtttcggatcattatcttaacctaaaaccgctatatttataagtattattacgaataatcttaacctgggatatgttatactaatcggaccagaaagatattattacgactttagtaaatgctttttaaatattaaataataattaattaagatttctaccattcattaattatacttaacaatagtttcacaccccccgccgccggaaaggtctaaccttctcattttacctttaatactcagtatttccgaaatagccgacgcgacactaatgatgaatgcttatctctcataaaacagataatttatgacaacataaaaaaccacattacgcgcaatcatatagaacaaaacaccatacatacagaaaaaaatagaaaatacatctaactaaatgattttatgaagttttaaacagttcgaaagcgcgttaaaaataaacaaaatcttcttctgttcactcttcaaaactcaccgtcgtgggagtacattgtttcgtgctgacttccacggcagggagtggcaataacagctaaaaggtcaagattcatgtcccccattgaaaaatccagcaaactcgaaaatgtctgttatgacattcgtggccccgttctgaaagaagcgaaacgccttgaggaagaaggtaataaagttcttaaactgaatatcggcaaccccgcccccttcggattcgaagcgccggacgaaattctggtcgatgtcattcgtaatttgccgacggcgcaaggatattgcgactcgaaagggctttattccgcccgtaaagcgattatgcagcattatcaggcccgtggaatgcgcgatgtaaccgtggaagatatctatatcggtaacggcgtttccgagctgatcgttcaggcgatgcaggcgttgcttaacagtggcgatgaaatgctggttcccgcgcccgattatccgttatggacagcggcggtatcgctctccagcggcaaggcggtacattatctttgcgatgaatcttccgactggttcccggaccttgacgatatccgcgccaaaatcaccccacgtacgcgtggtattgtcattattaatccaaacaaccctactggcgccgtctattctaaagaattgttgatggaaattgtcaacattgcgcgcgagcataatctcatcatcttcgccgatgaaatttatgacaagattctctatgacgatgccgagcatcactctatcgccgcactggcgcctgatctgctgaccatcacctttaatgggttgtctaaaacctatcgcgtcgccggcttccgccagggctggatggtgctgaacgggccgaaaaaacatgcgaaaggctatattgaagggctggagatgttagcctcaatgcgcctgtgcgccaacgtcccggcgcaacatgctattcagaccgcgctcggcggctatcaaagcattagtgaatttattctgccgggcggtcgactgtatgaacagcgtaaccgcgcctgggagttgattaacgatattcccggcgtttcctgcgtaaaaccgcgcggcgcgttgtacatgttccccaggatcgacgctaaacgttttaatattcacgacgaccagaagatggtgctggacttcctgctacaggaaaaggtgctgctggtgcaaggtaccgcctttaactggccgtggccagatcacttccgcattgtgacgctaccgcgtgaagatgacctggagatggccatcaaccgttttgggcgtttcctctcaggttaccatcaataatcttaaattcaggctacttcggtagcctgaattgcatcttcatctccctccccgcacaatgaagtctgccgcagtgaaaacaaaaggtaatctatgaagcagagccattttttcgcccatctctcccgcatgaagttgattaaccgctggccgctgatgcgtaacgtgcgtacagaaaacgtctccgaacatagtctgcaggtggcgatggtcgcccatgcgttggcggcgataaaaaaccgtaaatttggcggtcagctcaatgctgaacgcatcgcgcttctggcgatgtatcatgatgcctcggaagtactgaccggcgatctgccgacgccggtaaaatattttaattcccagatagcccaggaatataaagcgatcgaaaaaatcgcccagcaaaagctggttgatatggcgccggatgaattacgcgatattttcgcaccgcttattgatgagaatgcctggagcgaagaagaacaggcaatcgtaaaacaggccgatgcgctttgcgcctacctgaaatgcctggaggagctctcagcgggaaacaatgagtttggactggcaaaaacgcggctggaaaaaacgctggaattacgtcgcagccaggagatggactattttatggcggtattcgtaccaagtttccatctttctcttgacgagataagccaggattcaccgctttagttgccggatggcggctaacgccttatccggcctaccgttcttcccgtaggcctgataagcgtagcgccatcaggccttttcctgtctggggttaaaacggaaacaacattggaatcatcacaatacaaaccgccatcacaataagcgtgaacggcacgccaagcttcacaaaatcgctaaagctatagtttcccggccccagaaccagagtattgaccggcgatgaaaccggcgtcataaaggcggcggatgccgccatcgccaccgccatcgcaaacggatagggcgacacccccatcgatttcgccgccgccagcgcaatcggcgccatcagcaccgccgttgccgtgttagaaatgaacagtcctatgacggcacacagcacgaacaggcatcccagcatcatatacggcccatagccgccgccgatatccattaatccttgcacgaccagagagacgccgccggttttttgcaacgccagcgcaaacggcatcatacccacaatcaagataatactcggccagtggatcgctttatacgcgctttcagcatcaatacagcgaaatttccccatcagcaggcaggcgataatcgccgcgatcgggttgggaatttcatcggtcaacatcagcgccaccatcagtaccaggcagaaaatggcgtgcggcgcctggctgtgcgcaggagaggcttcgctgacctcgaccggcatattcagcaccacaaagtcgcggcctttttgccccagcaggctgattaacttccagttccccacaaccagaatgatatcgcccatcaataacggttcatcggccagcgatccttccagcgcgacgccgtcgcgtttcaggccgaccacattcagcccgtaacgtgtacggaaggcgatttcacgcaccgacttgcctatcagttcagactccggaataagcgaaatttccgccatgccaacatccaacgcctgatcggaaaaatattctccacgcaataccatcggttccagcagttgctcggcgcagaactctctgaggtcaacctccgccgccgacatatcaatcagcagaacgtcgcgagcgcgaaactccgatacgccgttcacattgacgataacccgccgaaagcgccgccagcgttcaacgccgatgacattggcgccgtaacgttcgcgcagtttaaggtcgtccagccgctgtcccaccatcggcgaaccggggcgaatcgccagacgacgagcgcgccccgtcagacggtactcgcggataagatcgcggaaagtgcgacgcttaccggcctgttgtccgggcgcatcgccttttagcatgaagcgcatcaccagcatataaacaatgccgagcgccaacaccactacccccagcggcgtcacgctaaaaaagttgaacccgtgcaggccttcacgcagcagttcactgttaaccaccaggttcggcggcgtcgccaccagcgtcatcattccgctgataagcccggcaaaactcagcggcatcatcaggcgcgaaggcgaggtctgcatatgcatagaaacgctaagaacaacggggataaagatcgccaccacgccggttgaactcatgaaagcgccaagtccggcgacggtgatcatcagtaaaaccagcatcttgatttcactgctgcccgccattttaaccagccaggtaccgaccaccgtcgcaacgccggtgcgcacgaggccgtcgccaataataaataaggcggcgataagaatgacattcggatcgctaaagccggagaaggcttccggaagggtcaaggtaccgctaaggacaaaagcaacaatgacgaataaagccaccgcatccatacgtactttgcccgtcgcaaacaacacgacggcaatcgccagtaaagagagaacccaaatcaattcaccgttcacaacatatccttgtcagatgagaagataacgcgattctgccataaatatgccccgccaaagcggggcgatatcatgatcaggtctttcttaacaccaccacatcgccgtttggttgtttagcgaccgataattgcgtcaggctatccaacgcaaaatcaacatccgccagacgcggcgtgtcggccggcgcattgaccgcaatgacgtggcagcccgcagccagcccggacagcacgccagccggggcatcttctactacgacgcactcctgaggggccaggccaagcagttgtgcgcccagcaaatacgcatccggctccggtttgccgcgtttgactcgttcggcggtgacaaacacctctggcgctggaaggcccgcgacctgatggcgcgcacgcgcgaccggcattgaaccggaggtgacgatagcccacggaatgcccactttattcaggtgattgagtaaatcgactgcccccggcagcgcggtgatccctgcggtttcagtggcttctatttgctccaggcgcgtaaactcagcggcaatttccgcctccgatttacccgccataaaatgccgcaacgaggtgatcgcctgtttgccatgaataaagcccagcacctcatcatgagcaaggttaaaacgatcggcccagctacaccacgcgcgttcaacggcaggtaatgagtcaaccaacgttccatccagatcaaacagaaaacctttacactgcacgcgagcctcctcaggcattaatgatttgattgatttcattcgcgctcaggtggtactgacgcgggcaggcatgccagacattcaacatccgctggtatttttcccacatcggcgtctgggcattaaagccgtgtgtcccggcgtcaaagtgagtgtagcgtccttctatattcaccataaaacggacatagccgaggtagcgcgcttctgtcgcggcgtcaaaccccaggaaggtgacgcgacgttcgtcgatggcttgcgtatctttgaggttggtccaggagacgtgcagcgcatggtacatctccataatatcgatgatggtacgacaggtctcttccgtcagctcgccaaactcgcgatccagctcgcgcatctgcaggccgtagccgcgttcaataattgtttgtaagcgacggtaacgctcggcgttggtgggatcgagcatcgtcatcattttgtactggttagacaaaatcagacgttgcgcgttggtcatttccattttgaactcctgtatcacgctatggcgatgaaaaaaagaaggcattggtatgccttcttttatatgcgtaatccggggtcaattacaaatcatccaggaaagttttatccagttgtttgaaggcgcgcttaagcgtgtcagctaatgcctggtaatccggctttccttctaccggcgccagcgcttgtccagcctcctgcaatttaccgcgaacttcgtaaaaccagttaaggattgaaggcggcaacggcgtcacggaacgtttccctaaccaccataatccctgcatgggcaagctcagggcgaacagggcggtcgccacggccggacctaactgaccgcccagcgctatctgccagcataatgtaaagacggcgacaggcggcataaatcgtatggcatagcgcgtcatacgaatgacgcggttttcgacgaaaacgggcgccagccgtttttccatcggccacgtcttcgcgtagtgctgcccccggcgaaataagctaaaaaaatttacggagcgattatccggtgtcgacatggcctacctcaacttcacatataaaatttaaaaaatttgtgcaaaacaacaactgcgagggacaacgttcaaaacattttgtcttcgatacccactatcaggtatcctgtgtcggcctgtcaaaggccggtagtttaaaatcattgagtcgtcaatattacacatagtatgccattggctgaaaaatacgcaaaatggcatagactcaaaggtatttcttccatcatgcccaaaaaaactcctgcgcatgatgttaatcataaatgtcagggctatcatgcgctacgctctatggctcactgacgtttttttagccacgtatcataaataggtacttccatgtcgagtaagttagtactggttctgaactgcggtagttcttcactgaaatttgcaattattgatgcagttaatggtgatgaatacctttctggtttagccgaatgtttccatctgccagaagcacgcatcaaatggaaaatggacggcagtaaacaagaagcggctttaggtgcaggcgccgctcacagtgaagcgctgaactttatcgttaacactattctggcacaaaaaccagaactgtctgcgcagttaactgcaattggtcaccgtatcgtacacggcggcgagaagtataccagctccgtagtcattgatgagtccgtcattcagggcatcaaagattccgcctctttcgcaccgctgcataacccggctcacctgattggtatcgccgaagcgctgaaatctttcccgcagctgaaagataaaaacgttgcagtattcgacaccgccttccatcagaccatgccggaagaatcttacctgtatgccctgccgtacagcctgtataaagaacacggcgttcgtcgctatggcgcacacggcaccagccacttctatgtaactcaggaagcggcaaaaatgctgaacaagccggtagaagaactgaacattatcacctgccacctgggcaacggcggttctgtttccgctatccgtaacggtaaatgcgtggatacctctatgggtctgaccccgctggaaggcctggtcatgggtacccgttccggcgatatcgaccctgcgattatcttccacctgcacgacactctgggcatgagcgtggatcagatcaacaaaatgctgaccaaagagtccggtctgctgggtctgactgaagtgaccagcgactgccgttatgttgaagacaactacgccaccaaagaagacgctaaacgtgcgatggacgtttactgccaccgcctggcgaaatacatcggttcttacaccgctctgatggacggtcgtctggatgcagtcgtgttcaccggcggtatcggtgaaaacgccgcgatggttcgcgagctgtctctgggtaaactgggcgtgctgggctttgaagtcgaccacgaacgtaacctggcggcccgcttcggcaaatctggtttcatcaacaaagaaggtacccgtccggcggtggtgatcccaaccaacgaagaactggttatcgcgcaagacgcgagccgtctgactgcctgatttcacaccgccagcctcgctggcggtgctgttttgtaacccgtccccaaaagacggtaacgaaagaggataaaccgtgtcccgtattattatgctgatccctaccggaaccagcgtcggcctgaccagcgtcagcctcggcgtcatccgtgctatggaacgcaaaggcgttcgtctgagcgtctttaagcctatcgcccagcctcgcgctggcggcgatgcgcctgaccagaccaccactatcgttcgcgcgaactctaccctgccggcggctgaaccgctgaagatgagccacgttgaatctctgctctccagcaaccagaaagacgtgctgatggaagagatcatcgcgaactaccatgcgaataccaaagacgcggaagtggtgctggttgaaggtctggttccgacccgtaaacatcagttcgctcagtctctgaactatgaaatcgcgaaaacgctgaatgcggaaatcgtttttgtcatgtctcagggtaccgacacgccagaacagctgaacgagcgtatcgaactgacgcgcagcagcttcggcggcgcgaaaaacaccaacatcaccggtgttattatcaacaaactgaatgcgccggttgatgaacaaggccgtactcgcccggatctgtcggagatctttgacgactcttccaaagcgcaggtgatcaaaatcgatcctgctaaactgcaggaatccagcccgctgccggttctgggcgcggtgccgtggagcttcgacctgattgcgacccgcgctatcgatatggcgcgtcacctgaacgccaccatcattaacgaaggcgatatcaaaacccgccgcgttaaatccgtcactttctgcgcgcgtagtattccgcatatgctggaacatttccgcgcaggctcgttgttagtgacctccgctgaccgtccggacgtactggtcgcagcttgcctggccgcgatgaacggcgtagaaatcggcgccctgttgctgaccggcggctatgaaatggacgcgcgcatttctaaactgtgcgaacgcgcattcgccaccggtctgccggtctttatggtgaacaccaacacctggcagacttcgctgagcctgcaaagcttcaatctggaagtcccggttgatgaccatgagcgcatcgagaaagttcaggaatacgtcgcgaactacgttaacgctgagtggatcgagtcgctgaccgccacttccgagcgtagccgtcgtctctctccgccggcgttccgctaccaactgactgagctggcgcgtaaagccggtaaacgcgtagtgctgccggaaggcgacgaaccgcgtaccgtcaaagcggcggcaatctgcgctgaacgcggcatcgccacttgcgtactgctgggcaacccggatgaaatcaaccgcgtcgcggcatctcagggcgttgagctgggcgcaggtattgaaatcgtcgatccggaagtggtgcgtgaaagctatgtcgctcgcctggttgagctgcgtaagagcaaaggcatgaccgaaccggttgcccgcgaacagctggaagacaacgtggtgctcggcacgctgatgctggagcaagacgaagtcgacggcctggtttccggcgcggttcataccaccgccaacaccatccgtccgccgctgcagcttattaaaacggcgccgggtagctccctggtctcttctgtgttctttatgctactgccggaacaggtttacgtttacggcgactgcgcaatcaacccagacccgaccgcagagcagctggcagaaatcgcgattcagtctgcggattccgccattgccttcggcatcgaaccgcgtgtggcaatgctctcctactccaccggcacctctggcgcgggcagcgacgtagagaaagtacgtgaagcgacgcgtctggcgcaggaaaaacgtcctgacctgatgatcgacggtccgttgcagtacgacgccgcggtcatggctgacgtagcgaaatccaaagcgccgaactcgccggttgcgggtcgcgctaccgtgttcattttcccggatctgaacaccggtaacaccacctacaaagcggtacagcgttctgccgacctgatctccatcgggccgatgttgcagggtatgcgcaagccggtgaacgacctgtcccgtggcgcgctggttgacgatatcgtctacaccatcgccctgacggcgatccaggcttctcagcagcagcagtaacagtaaaagctaatgccggatggcggcgtgaacgccttgtccggcctacaggtgagataccgttgtaggccggataagacgcgttagcatcgccatccggcattctgctatttaccctgcaaagcggaattttttgcttaactgcgctgcatcaatgaataactattcccttcttctcatacttagcctctttgctttgcaacagggatagtctgtcatgtctgtcgttacagaatcaaaaacagccagaaaatgggcaatgcccgatacgctggtcatcatcttttttgtcgccattttaaccagtatcgccacctgggtcgtccccgttgggatgtttgatagccaggaagtgcagtatcaggtcgatggtcagacaaaaacccgcaaagtcgtcgacccgcactcttttcgcattgtgaccaacgaggccggggaagcgcagtatcatcgagtacaatttttcactaccggcgatgaaagaccagggctgatgaattttccgtttgaagggttaacatccggatcgaaattcggcactgccgtcggcatcattatgtttatgttggtgattggcggcgcattcggcatcgtgatgcgtaccggcaccgtggataacggcattctggcgcttattcgccacacgcggggcaacgaagtcctgtttattccggtgctatttgtcctcttttcgttagggggcgccgtatttggcatgggcgaagaggcggtcgcctttgcaattatcatagccccgctgatggtcaggctgggctatgacagcattaccaccgtcctggtgacctatatcgccacccaaattggctttgccagttcgtggatgaacccgttttgcgtagtcgtcgcccaggggattgccggcgtgccggtactttccggctccgggctgcgtattgtggtctggattgtcgccacgctgattgggctggtttttacgctggtctacgcctcacgcgtgaaaaagaatccgctgctgtcccgcgtccacgaatccgatcgctatttccgcgaacagcaggatgaagtcgtccagcgccctttcaccttcggtgactggctggtactgctggtcctgaccggcgtaatgatttgggtcgtctggggcgtgattgtccacgcctggtttattccggagatcgccagccagtttttcaccatgggcgtggtgatcggcctcattggcgttatcttccgcctcaacggtatgacggtcaacgtgatggcgtcctcattcaccgaaggggcgagaatgatgatcgcgcccgccttgctggtgggttttgccaaaggcattctgctgctggtcggcaacggcgaagccggggaacccagcgtgctcaatacgttgcttaacagtatcgcgcatggcatcagcgggcttaataatgctatcgccgcctggtttatgctgctcttccaggcggtatttaatttctttgtcacgtccggttcgggtcaggcggcgttaaccatgccattactggcgccgctcggcgatctggtcggtgttaaccgtcaggtgactgttctggccttccagtttggcgatggcttcagccatattatctatccgacatcagcctcgctgatggccacgctgggcgtgtgccgggtcgattttcgcaactggctgaaagtgggggcgtcgctgctgggactactgtttattatgtccagcgtggtcgtcattggcgcgcagatgatgggatatcattgatccaaaatgccggatgagcatcagcgccatccggcaatatctccatgattaaagcagtgatttcgcggcttctacaatcgcttcggcggtgagtccgtactctttttgtaagaaatcctgcgttcctacctgcccataacgctctttgacgccaacacggcgcatcggcaccggacagttttccaccagcacttccgccaccgctgaccccagtccattatggatgctgtggttttcacacgtgacgatacgccgcgttttttccgcgtagtttttcaccaacatgcgatcgataggctttaaggtgaacatatcaatgaccgcggcgctcacaccttcctgctccagttggcgcgccgcctccagcgcctccgccaccataatgccgttggcgataagcgtaatatcatcgccctcgcgcagtacgttgcccttgccaatggtaaaggtagagcctggcgcatagatactccgcgcctgcttacggatggtacgcagccagtaaaaaccgtccaggtccattagctggcgtaaaatatccgcgaacatcaccgcatccgtcacctccagtactacggagtgcgccagcccgcgaacaatccccatatcttcaaaagacatatgggtgccgccgttatggcacgctgtcactccggcatcggaggcgatcactttgacgttgttacgctgataatccagcgccataaagagctgatcaaaacagcgacggctggcaaaagcggtaaaggtatgcacaaacggtttacgaccggtcagcgccagccccgccgccgtgccaatcacattcgcctccataataccgcagttaatgacatgctgcgggtagtcacgcgccacgctgtccatcgccattgagctcattaaatcagcctcaagcgcaataattgggcttccggcctcaatctgcccggcgataaaaccggcgtaaactttgcgcatttcgatatcgtctttaagccctgcgggcgcaagcttaatcatgcatgacctccagttgatgaatggcctcattgaacgtctgcttcatgccatccgtcaggcgtaagtggtgagaattcgttaactgctccaggcatggcaccccctgccctttaatgctgtcaaggatcacaacccgtggctgggcatcggcgggcggcacaggctgaaccaccgccagtagtccggcgatatcatcgcctttgacggtgacgacatcgaaaccaaacgcacggaatttcccttccagatcgaatggattgataatctcctccagctcgccgtcaagctgctgtttattccagtcaatgaaaacggtcagattattcaggcggtggtgggcaataaactgaaacgcctcccagcactgcccttcattcagctccccatcgccgacaatgcaaaatacccggttgggtcgccgcgccagtttatgcgacaacgccattccgcccgcaatagagatgccctgtcccagtgagccggtcgtggcgtccacgccgcgcgtttttagccgatccggatggctgggaagacgggtgccgttctggttaagcgtattcagctcttcgcgcgggaaatagcctttaatcgccagggtactgtacaacgcggggcccgcatggcctttcgacagtacgaagtaatcgcgttccggccagtccgggtcggcagggtcgattttcatcaccgcgccgtacagaaccgccagagtctccactaccgacatgctgccgccatagtgaccaaagccaagatggtttaaggatttgagcgtggcgacgcgaatatcgcgcgccagttgggtgatttcggttacgttcattctttcgctccgctattttcctgcacttcggcagtcgcttttttgtttttggccaacacgttgtacgccaccagtagcgcgaatagcgccaccaccagccccgtgatagccatcggcgacagataacgcgccaggttgcccagcaaaataccgattacgccaaagtcagcatccgagaacgtggtattggcgaagccgatcgcgccgagaaccggcagtaacagcactggcaggaaagtgattaatagaccattagcaaatgcgccgatcatcgccccgcggcgaccgccggtggcattgccaaagacgcctgcggtcgcgccggtaaagaagtgcggcacaacgcctggcaggattaacacaagcttcatctgtccaagcaggaacagccccaccagcccgccgagaaaactgaacaggaagccaatcagtaccgcgttaggggcatagggatacaccaccgggcagtccagcgccggacgcgcgtttggcaccagtttttctgaaaagccggtaaaggccggaacaatttccgccagaatcagacggacgccttgcagaatgatgaatacgccggcggcgaaggtgattgccatgatgatggcgtacaccagatagttttgcccgccgctaaacgtcgcttcgacatactcacgccctgcgctgactgccatgatcagatagataatcatcatggtcagcgaaatcgagatagaactgtcgcgtaaaaaactgaggtttttcggcaggttcatctcttccgtggagcgggagcctttaccacacaggctgccaatccagccggaaagcacatatcccagggtaccgaagtgaccaaacgcaatgtcatcggtaccggtaatccgcctcatataacgttgagccaaggccgggaagaaggccatcaccagccccaggatcagcgatccggtgaagaccagccctacgccctcaaaccccgccacggtcaggattacgccaatcatacaggccatgtaaaaggtgtgatgcccggtcaaaaagatatatttaagacgcgtaaagcgtgccacgacaatattggccaccataccaaatgccataattaacgccgtggacgcgccatatttttccagcgcgattgagactatcgcttcattattaggaataatgccctgaatattaaaagcgtgttcaaacataccccctagcggatttaatgaacccaccagtacggttgcgccgccgccaagcacaataaaacctaaaatggttttaatcgtgcctttcaccacatcggaaaacgcttttttctgcgccaccagaccaatcagcgcaattaaccctacaagcaccgagggcacttttaaaatatcaacaacaaaattcagcgtttcaaggataaacatatccacctcgccagcaataattattgtttagcgaaccatgcgcgcagctgcgtttccagttcgttgatgtcgatgatgttattgatcaccaccagttggctttccggtacgctggcgctggccgcgatatctttggccattacaaaaagatcggcagccccgggcgtggccgatgaaagatcggagtgttccacctcggcgtcaatattgagtttctttaatacttttttaatgttcatttctaccataaaactactacccaggccggaaccgcaaattgccatgattttcattattgtcaccttttaaaagtagagttggtctgcatcacgcacgggcgtaatgttatttaccgcaagaaaatggaataaaatcagaaacggtcaataatcgttttaatgtcctccaggttttttgcctgatgtaatttttccatatctacatcactggaaaataattccgccagcgccgatatcatttcgatatgactgtgcttatcaggcgccgccagcataataatgatgtcaaccggatcgaattcgtctgcgccaaatgaaacgccgtgctgtagtttcagtaacgataaacctaaccctttcgccccctcttccggcctcgcatgcggcatcgctaaccctggcgctaatacataatatggcccaagcttttggtgctgctgaacaatcgccgtaaggtattccggtgcgataacacctgcgtccagcaggggtttgccgcaaatttccagcgcctgcggccacgtttccacgctctcctgtagcgtgatggttgcgtcagataaccaggttcccagcatgttattcgcccccacggtgtatgaaattatgaacaaactttattcaagccattcgatattagctgcgatcgttatcacaaagatagcgctaccagcgactattactcagaattgtgatagcgctatcaaattaaaatcatggtgtgaaatcacagcaaaaaagcggatttaaggcgtatactgccagtcatgcgaagcaaagaacgacaataaaaaagcatctcaacatgttgtaatgacgcaggaatttgtatgtcgataccccgtaaacggcgcagtaccggtaaagtgactatcgccgatgtagcccaacttgccggtgtaggcacgatgaccgtatcacgagccttacgcacgccggaacaggtctctgataaactccgggaaaaaatcgaagcggcagtgcatgagctgggctatatgcctaatctcgccgccagcgcgctggcgtctgcctcctcgcacaccatcgcaatggtcgtaccgaaccttgcggaagcggggtgttctgaaatgttcgccgggctgcaacaaattttacagcccgcaggctaccagattatgctggcggaatcgcagcatcgcgtggaacaagaggagaagctgctcgaaacgctgctggcctccaacattgccgcagcgattctgcttagcgtcgaacatagcactaccgtgcgccagtggctaaaaaatgcctctatcccggtgatggagatgggcgcgattcgcagcgatcctattgatatgaatatcggtattgataacgttgcggcaatgtatgagctgacggaaatgctgattcagcgcggttatcagaatatcgggctgctatgcgccaatcaggagcagtggatttttcagcaacatctgcacggctggtacaaagcgatgcttcgccaccatatgtcgccaaaccgggtgattaatgccgccttgccgcccaatttttctaccggcgcgtcgcaactgccggagtttttactggcgtggccggagctggacgcgctggtatgcgtatcggatgagctggcctgcggcgcgttatacgagtgccaacgacggcggatcaaagttccggacgatttagcggtggtcgggtttggcgatagcgatgtcagccgggtctgccagccgccgttaaccaccatggccgtaccgcaccgtaagattggcagtgaagccggacgggcgctgttggaaaggttaaatcagggaaactggagcgatcgaaaatccatcgcctccagtttatgtatgcgggaaagctgctaaaacgcttattccgtctcttccggtttctcctggagcgcggcttcgtttttggcgttgcgggtcatccacagcgccagcgctttgagcgaatctggcgtaaactcatcacagcgcgcggtgatctcctccggggtcagccaacacacttcgctgacttcatcttcctgaagcgcgaaaggcccgtgggaaacgcagctaaacagcgcgccccaaacccggcaatgttggtcttcaaagtaaaacagaccgtgttcggcaaacggcacgcctgcaatacccaactcttcttccgcttcgcggcgggcagattccagtagctgctcatcagcctgaaccacgccgcctgcggtagcatctaacataccgggcaaaaaatcttttgtttcggtacgacgctgcaccagaattttacccataccatcatgaacgacgatatacgtcgcacgatgccgtaagcgttgcgcacgcatctgttcccggctggactgtgcaatgacttcattgtcttcattcacaatatccacccattccgtacttgccaaacgacgctgttccaccatcaggaaaccttcttatttctggcgctcttacggcgcatttacgtttgtgaggtaaattacgagttaattgcaacctgcgcaatgatactttgatcattgagtgcgattacgctcaacacattatcatccagaataccgtagcttgccgcatacccgcctttcgggatgctcactgacccaggattaaagtgatacagtccttcctgctgttgcgccaccggcagatgcgtatgaccatagaccaacacatcgccagtatgcagagcgggcagattcgtcggcccgaagaggtgcccatgcgttaaaaatagccgcctctcttgcgtcaatatttgctgccacggcgcagttatcgggaaatgcagcagcatctgatccacttcgctatcgcagttgccgcgcacggcaatgatttgcgtcgccaccgcgttcaggcgttcggcaacctgagcgggcgcatagccttcaggcagcgcatttcgcggcccgtggttaaggacatcgcctaatatcaccagccaacgcgcgccgctttgcgcgaaccgctcaagcacgcgttccgtggcgggtaaagaaccatgaatgtccgatgcgaacatcagtttcatcgctcactcctcgttgtgaaaaacggcgttatgatactggaatatgaatagattttcagcctgaacgcttcgaggaaagcgcaataaaacgctgtacggaagcacgctgccactggaatgtcgcatatgccgccagcgatgccggcacgtcatcgccatgcagcgccagacgattgatcatcaatgccagatcggtatcggcaatgcaccattcaccaaataaattttgcgtcccctgccccaatagcgcttcagccgtcgcaaacagttttgccgcgctggcttttccagcctcgcttagcggcgcttttttcgccccggcaaacactacgtcggtaggccgttcttcgcgaagcggcagtaaatcgctgcgtagccacgcctgaatctgtcgcgcgcgggcgcgtttttgtaaatcgtgcgggtagatacgctcccactgcggcggcgcgaaacgctcctccaggtattccgcaatagcggacgactcgctcagctcaaaattgtcggcctcaagcaccggtacgcgctgcgtcagcgcatatcctcgccagccaggttgcagatgttctccctggtccagatcgcgagttttcagagtaaaggaaagccctttttcttgtaatgccacccaggcggacaagacgtagggagagaaaaagttcgcatccgaccacagcacaataacaggcttactcataatgtcctcttgagggcgtattaggtttcttcccaaaatatagcgtctttcgcctgctgtcacctgatgaaaactcacacacatcaggaggctttctatacttaattcagcccagactctttacgcacatgcaggagccaaaatgattgacctttactacgcccccacgcccaacgggcataaaataacgctgtttctggaagaggcggagctggcgtatcgtttgctaaaagtagatatcagcaagggcaatcagtttcgccctgattttttggctatctctcccaataataaaattcctgccatcgtcgatcacgccccggcagacggcggtcaaccgcttagtctttttgaatccggcgaaattcttctctacctggcggaaaaaagcggcaaactgcttagcggggagctgcgtgaacgccataccacgctgcaatggctgttctggcaggtcggcgggttagggccgatgctgggccagaatcatcactttaaccactttgcgccgcaggccatcccctatgcaattgaacgctatcaggttgaaacgcaacgcttatacaacgtcctgaataaacgcctggaaacctccccgtggctgggcggcgaccactacagtattgcggatatcgccagttggccgtgggttaacgcacatcagcgtcagcgaatcgatcttgatacctacccggcggtgtataactggtttgaacgcattcgcacgcgtcctgcgacagcgcgcgcactgttacaagcgcaactgcactgtaacagtacgaaagcgtaacgcggtagcatacatcatgtatgatgtagaggtgtatacacggaaaaaacctgcgtccggcacccttattcgtattaaaaacctgacattagggaagaggaaatcctccctactctggaggtcatatgcagattctgattaccggcggtacaggcctgatagggcgtcatctcattccccggctgttaacactggggcatcaggtgacggtcgttacgcgcaatcccgataacgcgcgtcagattctcgattccagagtgacattatggaaagggctggcggaacgtgagcacctcaatgagattgatgccatcatcaatctggcgggcgaaccgattgccgacaagcgctggacgtcgcaacaaaaagaacggttgtgccaaagccgctgggctatcacgcaaaagttggtggatttaattcatgccagcgcaacgccgccctcggtgttgatatccggctccgccacgggctattacggcgatctgggtgacgttgtcgtcactgaagatgagccgccgcacaacgaatttacgcataaactttgcgcccgctgggaacagattgcctgtcgtgcgcagagcgaccagacccgcgtctgcctgctgcgtaccggcgttgtcctggcgccgcaaggcgggattctggggaaaatggttccgccgtttcgcctcgggctcggcggtccggtgggtaatggtcggcaatatctggcctggattcacatcgacgatatggtcaacggcattctgtggctgctggataacgatcttcgcggtcccttcaatatggtctcgccgtatcccgtccataatgagcattttgctcatgcgctgggtcgcgcgctgcgccgtccggcgattattcgcattccggcgacggcaattcgcttattgatgggagagtcgtcagtgctggtgttgggcggacagcgggcgctgccaaaacggcttgaagccgccggattcgcatttcgctggtatgatttagaagaggcgctggcggatgtgattcgctagttcccaaagcgccgtatcctgcccggtgagcgatgcgccgccgggcttcttttatttcagcgagcctttcaggaattgctgtaaacgcgggctttgcggattgccgaacacctgctccggatcaccctcttcttcaattttcccctgatgcagaaaaataacgtgcgaagagacatggcgagcgaagcccatttcatgcgtgaccaccaccatcgttttgccttcttccgccagttgttgcatgatgcgcaacacttcgccgaccagttcaggatcgagcgccgatgtgggttcatcgaacagtaaaacgtcaggttccatcgccagcgcgcgcgcaatagaaacgcgctgctgttggccgccggagagatggacgggatatttgccctgagcgcgctcatcaatccccaccttcgccagatatttcaacgcccgctcgcgcgcgtcgtgcttgcttaatcccagtacctgaatcggcgcttccatcacattttccagcaccgtcatgtggctccagaggttgaagtgctgaaacaccatcgtcaggcgggtacgcaacaagcgtagctgatttttatccgccactttgagctgcccatctttgtcgcgcaccagattaatgttctgaccgttcacgataatcgcgccttcgctcggtttttcgaggaagttaatacagcgcaaaaaagtgcttttaccggagccggacgagccgatgatgctaatcacatctccggcgcgggcctgcagcgatacccctttcagcacttcatgaccgccgtagcgtttgtgcaaatcgataacgtgtaatttattttctgacatcatgttactcgaattatttagaggacacgtgctgcaaccagcgtctttccgcccgacggaacaggcttatcaggacatacgaaatgagtaaatacaacacggcggcaatgccaaacgcggtaaacggctggtaagtcgctgagttaatatcgcgggcgattttcaacaaatccggcaccgtcgcggtaaacgccagcgccgtagagtgcagcattaaaatcacttcgttgctgtaggcaggcaaggcgatgcgtaatgccgacggcaaaataatgcagcgatacattttaaatgacgagaagccataggcccgtgccgcttcaatttcaccgtgcggtaccgagcgaatcgccccggcgaaaatttccgtggtgtacgcgcaggtattcagcgtcagcgccagtacggtacagtttagtccgctgcggaaaaacgcgttaagaagatcggtgcctttgactatctccagcgtatacatccccgaatagaacaccagtagctgtacgtacagcggcgtgccgcgaaaaatatacgtaaacagccagatgggaaaacggatgaatttattactggaaacgcggcctaccgccagaatcaccgccagaagaccgcccatcaccaccgatgaaattaacagccacagcgtaatcgccacgccggtaaaacgatagccatccgtccaaagcagggatttccagtactcctgaatgatctcaatcacaaatcggccctcttcacgcccacggaatagcgacgctcaagtaagagcagcacaccattggaaacggtggtaaataccaggtagataagtccacagaccacggcaaaatagaaaggctcccaggtacttttaccggcaagctgcgtggctttgacgacatcttccaggcccagcagcgacaccagcgccgtcgctttgagtatcacctgccagttattgccgatccccggcagggcgtaacgcatcatcgccgggaacataatccgccggaaggtttgcccgtgggtaaaaccaaaggccgtcgccgcctcgatatggcctttcggcaccgccataaacgcgccgcgaaaggtttcggtaaaataggcgccgtagatgaaaccaagggtgataataccggccaccatcggatcaatatctatctggtcgatacccagcgaatcggtcaccacgttaagcgcgatttgcaatccgtaaaatatcagcagcattaagaccagatccggcaccccgcgaatcagggtggtgtacccttcaaaaataagccccgttacccggttttgcgaaagcttcgcccccgcgccgacgagaccgataagcacggccagcaccacggaactgagcgccagttccagcgtgacgatcgcgccctgtaaaattacgcctgaaaacccgtacaacatgcagcctgtcctgttgtgtgtggtgaagtaataagcctcttttgcatttttgcctcacatcacgccggatggcggctgtgccttgcccggcctacgatgctccccgtaggcctgacacgcacagcgccatcaggcaatgcagacagtcaacattctttgggctttatctgcaccgacggtgattaaccgccataaacatcaaaatcaaagtactttttcgccagcttttcgtaagtaccgtcagcacgcatttcagcaaaggctttgttcagcgcttcgcgcagctcgttatcctctttgcgcagccccataccggttcctacgccgaataacttctcatctttcaccgccgggccgccgaatttatagtcttttccgacgggctgtttaaggaaaccttcgctggccgcgacctcgtcctggaacgccgcatcaatacggccagccgtcaggtcggaataaatgttgtcctgcccctggtaagagacgatctcaatccctttcggcgcccagtgctcattgccgaaggtctcctgcgtcgtcccctgtagcacgccgacgcgcttgcctttcagcgacgcgacggtcggctgaatatcagagttcttcgccaccaccagacgggaatcagcggcgtaaagcttgtcggtaaacgcgatttcctgctggcgcttttcagtgatggacagcgaggacatgatggcatcaattttcttcgcttttaaagacggaatcagcgcatccagcgggttttccacgaacgtacactgtgtgttgatacgtttgcacagctctttggccagatcgatatcaaagccgaccaattcaccttgtgcatttttggattcaaacggtgcgtatgtaggatcggtaccgatgcgaatcttttgtggaatagcggcaaatgctgcggtagcgctggaaaatgccagcaccagagaaagggataacgccagttttttcataactatcctcaacagactgtctttccaggagatctttacagatccgatgcgactatcgtgccattaatcaggccgacaaggcaaagcattctaccttgtcagccggtttattttgcataaaaatcgattaagtatgcatttatgcgcctgttccgcaacggcttatgcaccaaaaaggggcaaaacatctattttgcaccgtgatagttccccagcgcggcgcgttatccccttccctcaatcgccgtaaacattaaaatcgaagtactttttggccattttgtcgtaagttccgtcctggcgcagttcggtcagcgctttatcaaacgcggcttttagctcggtatcatctttacgcagcccaacccccgtcccgtcgccaaaatattttttatccttcacggaaggaccggcaaacgcatactctttgcccgctggctgcttcaggaaaccttcgctggcggcgacttcatcctgtaatgcggcatccagacgaccggcggttaaatcggaatagataagatcctggttggcataagccaccacatccacacctttagtgcgccagttatcattggcgtaagcctcttgcgtggacccttgcagcacgccgacatgcttgcctttcagcgattccagcgtcggctgaatgggagacccttttgccgcaatcaggcgtgaatccgccgcgtaaagtttgtcggaaaacgcaatttcttgctggcgtttatcggtgatagagagcgatgaaataatggcatcaatttttttcgcttttagtgagggaataagcgcatcaaagtcgctggcgacccaggtacatttcacctgcatacgcttacacatttcattaccgagatcgatatcaaagccaataaactcgcctttggcatcttttgatgagaaaggcgcgtaggtggtatctgttccaatacgaaccgtttgcgggagcgcggcgtaactggccgccgtcgcgcccagacctatcagcaaagacaaagcgagaacggtcttcttcatacatacccctcaagtggcgtcattttcttatgttttacgtggcgttgtgtgtttgcagactttttcatgcaggtcttatgccattttcacgtcagcaaaacgattcgacgttaaatttgttaataaaacgttgcaatattgtcctgatgttgaagatagcaggtatgacggttgaaccgcagcgtttcggcggcttttaacgaattaaatgttgaggatatgatcgcggttacaaaattgccctgaaacagggcaacagggacaataatgcacgctaaacagacaacgctatgcgccctgccagcgaacaaaaagatcgtgcggaagggggatatcaaactgatccagcactcggttaaccgtttgatttataacatcatctaacgtctgaggaagatgataaaaagccggaaccggcggcataatcaccgcgcctatctcagcggcctgggtcattaaacgcaaatgcccgatatgcagcggcgtttcgcgcacacacagcaccagaggtcgccgctcttttaatatcacatccgccgcgcgggtaagcagtccgtcagtataactgtggacaatccccgacagcgttttaatcgaacagggcaagataaccattcccgccgtcgggtaagagcccgaggaaatgctggcggcaatgtcgcgcgcatcgtgcgtcacatcggccagcgcctgcacctcgcgcagcgaaaaatgggtctccagcgccagcgtttgccgggccgcctggctcatcaccagatgcgtttccacgctatcgacatcgcgcaaaatttgtaataagcgcacgccataaatcgctccgctggcgccgctaattcctacaatgagtcgtttcatgttctcttaccgtttacgagcgccgttcatcccactgtgttacgtaatcggctcaaagtgggtctgaagagataccatgacaaaagaatccctatcataaaagccagctcaaccaacattatcactaccccctgctcactaaaccaggtgccgaccataatggcaaaattggtgataatgacaaatcgggccgtccaggggaaaagcggcgatcgatagcgtagcaaatcgctggcgtacgttccattacgcaccgattgtcggaagcgatactggcaccatccgatggttatccatgccaggcaacccacctgcccggtactggcgatcagatataaataaaattgctgtgcgggaatatagcgggtcagcaacgacactaacgccaacaaggccgtgattaaaatagcatacaccggcacgccgccgccgttcgttttaccaaagcaggctggcgcaaagcgatcgcccgccatagaccacagcatacgcgaactggcgtaaatggccgagttagcggcagaaaccgcggcggaaaagatcaccagcgtcatcagcgtatccgcccccggaatgcccgcgtgggagaatacccatacaaagggactttgtccatttggcgtcagttcatgcggatagaccagcgccagcaccgcaatcgccaggccgtaaaacaaaatgattctgagaccgatccccaggatcactttcggtaaaataatgtgcggcgattcggtctcccctgccgcatttcctaccagttccaccccctggaaggagtaaatcacgatcgtcatatagaccacaatttgctcccaaccgtggggaaaccacattccgtctgtttttaacgtcgggtgccagtcactatggcccattagcgagtagatcataaccccgcccgcgcaaataaacagcacgatcgcgaaaaccttaatggccgaaagccagtattcgcattcgccaaaactttttgcggaggtgagattgatggccgtcaggatgagcagaatcgccaggcagaacatatataccggaaccgcggggaaaaactggtgagcaataaaccctgcggcagtgaggtcggccgccagggaaaagacccagctaaaccagtaaagccagccaatggtatagctccagcaaggtgacggcataaacatcagcgcgtaatgttgaaatgaaccggagtgaggaaaggcgcatgataattcgccaagacacatcatcgtcgccagcataatggttccggcaaacagataggccagtaaggttcccgccggcccgacgctgcttaacggttcggcaatgccgataaataagccggtgccaatcgtgccgcccagcgacatcatcagcaggtgccgcttcttcaggttacgccgcagaccgccttcaggctctgctggcggagattgttgcagggtatccatcgttactccctgtctttcgtgaggtcaaagatgccgccgcgacatagccgcggcggttatgcgttaacgcgtaaacctccaggcgacgcctttggtctggcaggccattaacaggcccgtataatccagctcaaagcgaaccacatcgcctacttttagcgactgacgacaatcttcaatatccaccagcgtatgatcgctggtttgtcctaagatagtgatagcgtcgtcgcatggcacacagttatccgacggcacatcctggcgaccaaacgccagcaatgcgcgtcggcgtatgccacgatcgacaaaggttttactttgcaaaaaggcatcgacgcccagctccccgaccgggacggtaggtttactgttcagttcgatgatttccgcttccaggatatacatatcggaacaggctttatcgaccggttttgcggagtggtgaaattcattcaggtatttcatgtccacatattcaatgccgaattcatgcagtccgccgatgcgcagatgattcagtccctgcggccagatacctttatccagcaggtgatagctggtgcagtttcccgcagaaagccgccggacaggaataccgctgtcagcttccagccgggcggccagcgccagaaaatcctcgccattttttaccgttggcaacacggtgccgtaacaattaaagttggtgcccagtccatataattccagaccgggcagaccagtaatcagagtcacggtctcaagaatgcgttgatattcaccaaaccagataccctcgcgtaaatcgcccatatccaccatcagtaatacctgatgcgttttcccctggcgttgggcttcttgcgataatgcccgtaataccaccggctcgctatttaaactaatatccgcgtagcgcaccacatcttcgatttcactcagacacggactgcgtaacaggcaggtcgtacatcctgtctcgcgtatttttttcaaattataggttcgtgattcagcgataacggtaattccgccgttgaacaccgcctgcgcggtttccacgcagccgtcaaaaactttattgacagccatcacgtcaataccgctacttgccagcagagctttttccgtgcgggcgttttcttccagcttgcgtagatttatttccagaactggcatatacattttattttcctcccgccatgcttaaacgggcattacgtttctgcgcccgatggtaaatgtactccgcgacgacaaccgccagcacggctccgccaataattttcccggcgtactggaaatatccgcccatatcaatttgagaaggcggaataaataacagcgcaacggcaaaggcgatagaaagaaagcccagcgcgggtaaaatagccggtaaaaccttgcccggaattttaaaacttcttggcgtatccggctgagtcttacgtaaacgccagaacgctgggaacatcaccaggtaaggaataaaataggtgatggtcgttagcgccgttaacatccagtaagccgccgcaacgcttggcgaaataaaagtcgaaaaacacaggaccgtgacaataatcgcctgtacagtcaaggcaaaggcgggcgttttccacaccggatgtaatttgccgattcggtcccccagcagattatcttcacgcgaggcttcctggagcatataaatcggccccaccagccaggagttaatctgcccgagagcgccaaaaaacatacagatggccataacaggaattaaccacggcatatgcagcgtatccgcagcagcatgcatagcctgcatgacgcctgccacgatgtcggttttcccggcgggtaaaagcgtatttagcgcccaggtgccgaccatatagatcccgacgataacggcggcggagacggccatcgctcgcggaaaatcacgctgtggattacgggtacgcccggcaatcatcggggcgacctccagtccggcaaacgcaaacatcatgctggataagaaaacgatcgtatcccagtgtccgagatccggaatccagtttttcgctgtagtgtagtccgtctgcatctggtgtccggtacatagccatactaccgccagcaaaatgaggatggcggagggaataaatacgccgcaccaggcgctgatgctattaataatttttgtccattccatcccgcggatattcatcagcgttaatagccagaaaattaccgcggaaccaataccgataaacgctttattttccgccaggccgccgccgatcatatagcccaacgcggtaaagccgaattgcagcattaatgggaaaaacagtacgcaggaaaagagaaaacaaaccacgacaatccatgcaatacgtttaccaaatgcctctttaatccagacaaatatcccgccatctttcggccagccggttgacagctcgccgcataccatcgctaaaggaaaaaacaagcagaatgcggcgatcacccataacaacatggccgatgccccgtaaggcgccacgttagggatttgccgcaaactcagaatagcgatgacattcataaagacaatgtctttgatgccaagtaagccagaattcgtgttactcatggccatctcctgttatgcattcaggcatcactgccctcttcttatcatctgacgacgggcttcagcatgaaactgaagcccaaaacagtattaataaatgtcgtacttgaccatatcttcgtaactgtcttcccgacgaatcagacgcgtgtcaccatttttatcgatcatcaccacgcccgtgcgcggacggttgttataaacggtttgactttcaatggtgtatgccccggcatcaagaaatgcgacaatatcgccaacatgagtctccttcggcagtaaaaactcttcgcctttcactcccatgtggaaataatctccgccatcacacagcggcccggctaattttatccaggcgtcgtgcgctgccgtcatgcgagaggcgttatagacataaaagaaccagtcaaaatgctggctgtcagagagtacgctgtaaccagcgtcgacaaatttccattcaacgtggcattccacattgccgttaagatcgtaatttgttttacgtttttcgcaggagacttccgtaagtaaaaccgccgccgacccggtcactttacgtcccggttcaatacatatttccacatcggtacgccatttatgcacttcgcgaatgaccgcatcggcaaaatcctgggcggtaataccggcatacatattatcttttaacgggtcgccattctcgtcgtcatatttatagggaaccggaattccgccgcccacgttgatcaaatcaaatttaataccaagcacctcttccaggcgacgggattcatccaccagcactttagtcgcttttgcgaaaggctctgactccggcacctgatcgcccacatgcatatgcaagccgcgcaaatgcacataaggcatcgccagaatgcggcggcaggtttcttccgcctgttccaggtcgagacccgacttcgcatggaaagcggtaaccagttccgcatgcgtcgccgagggaacattcggttctacgcggacgcaaacattggcgactttcttcagcttgcgagagatggcatcaatatgttccagctcatacaggctatcaacattaataagatacagatcgttggcgatggcatattccagatcggcaggctttttcaccacgccgttgaagacgatctgatcgccgcgaaagcctatctccaggcacttgcgaacctcatattgtgagtttgcctccgcgcaaattccggcgtcacgaatggctttcaacacccccatgaccgagcaggtttttgacgcaaagaaggttttggtatttttatgcgccgcaaatgcctgctggatttcatgaatgttacgaataatctccggctcagaaaacacatagaacggcgtggggtactggcgcgccagagcgtccagatcgaccccttcaaaacacaaatgaccgtctttgtgctggaaacggcgatcgccgttgattacctgctcacgtagctggttgtaattctgcataatcgagtcagtcataacgccctctgcttaatgtttatggtaaaaatccgcattctttacagggataaagcaaaaggcatgccactattttttatcaaaataatcaattagttataaaaataagctttttctcattttcgtcattgagtttgctattcatcacaacgacgaaaattcgtcacttttataatgacaacatgaacaatagatatgaggaatgcatatatggcatccaccaatcaggagctggcctcggcgctcaggatgttttcccgctttttcgatttgattcatcagccgttggccgtcattaatgagcgtggtgaatacgtttactacaatcaggaaagcgcggatctggacggctatagtattgaacgggcaatgggaaaacatatgctggatgtctatccgggcatgaaagagacgcaaagtacgatgctttcatcgttaaaaaaaggcgtggaatacattggccattatcaaatttattacaatgcgcgaggccaggccgttgactatcagcacaccaccgcgccgctctatgcaagcgatggcggcatggtcggcgttatcgaaatcggcaggaatatgtccggcgtcaggcggctccaggagcaggtggtagaactgaaccaactgctgtatgccgatcaccatgagaagcaccatgccattattaccgaaaatccggaaatgctcagtaatatcgccaaagccaaacggctggccgccagtaatattccggtgacgattgtcggggagacgggaacgggtaaggagctattttcccgcctgatacatcaatgcagcaagcgggcgaataagccatttatcgccctgaactgcggcgctctaccgcctacgcttatcgaaagtacgcttttcggcaccgtgcgcggcgcctataccggcgcggaaaatagccagggctatctggaactggcaaacgggggaacgctctttcttgatgagctgaacgccatgccgatagagatgcaaagtaagctgctgcgattcttgcaggataaaaccttctggcggctcggcggacaacagcaactccactctgatgtcaggatcgttgccgccatgaacgaagcgcccgtcaaattaattcaacaagaacgtctgcgggcagatcttttttatcggttgagcgtcggaatgttgacgttaccgccgctgcgcgcccgcccggaagatattcccttactggcgaattattttattgataaataccgtaatgacgtgccgcaggacattcacggattaagcgagacggcgcgtgctgatctgctcaatcacgcctggccgggtaatgtcaggatgctggaaaacgcgattgtacgcagcatgatcatgcaggaaaaagatgggctgctcaaacacatcatttttgaacaggacgagttaaatttaggcgtaccggaaaccgcgccggaaaatccccttccctcgtcacccgatccgcagtatgaagggtcgctggaggtacgggttgccaactacgaaaggcatttaatagaaaccgcgctggatacgcatcaggggaatattgccgccgcggcccgcagccttaacgtatcccgcaccacgttacagtacaaagtacaaaaatacgctattcgcttcggcgtggtgcgtaattgacatcggccagcggcattgcgccgctggcaaagccattagccttcgttatgcatttccaggttttccatttcgttctggaacagcaccgctttggcgtcgtcattacgtaatgaatccaggaagtcgaggtattgctggtctacgtctttggtgacatatatcccgttaaataccgaacactcaaactgctggatatccggattttccgcgcgtacggcttcgatcagatcgttcagatcctggaagataagcccgtctgcgccgatgatctgacgaatctcatccacctcgcgaccatgcgcgatcagctcattggcggtcggcatatcaatgccatagacgttggggaaacgaatttccggcgcggcggacgccagataaaccttcttcgcgccggcttcccgggccatctcgatgatctgctctgatgtggtgccacgcacgatggaatcatccaccagcaggacgttcttatcgcggaattccgcgcgattagcattgagcttacggcgcacggatttacggcgtagctgttggcccggcatgataaaggtacgtcccacgtaacgatttttgacaaatccctggcggtacggcttgccgagaatacgggcaatttccagtgcgatatcgcaggaggtttccgggatagggatcacgacgtcgatgtccagatcttcccattcacgagcgattttttcgccaagtttggtgcccatattcacacgagcgctgtagacggagatcttgtcgataaaggagtccgggcgagcaaaataaacgtactcaaacagacaggggttactgaccgggttatccgcgcactggcgcgtgaacagttgccccttttcggtaatatagatagcttcgcccggcgcgacatcgcgcagaaactcaaagcccagcgtatccagcgccacgctttcagaagcgaccatatactccgtacgaccatcgccaacgtcacgcttgcccagcactaacgggcgaatgccgtgcggatcgcgaaaagccaccatgccgtggccgataatcatcgccacgcaggcataggcgccacggatttgacggttagtcgcggcaatcgcggcaaaaatattgtcggcttccagcggatagtgacggaagttgtcgagctcgctggcgaaaatattgagcaggatttcggaatcggaggtggtgttgatatgacggcgcttttcttcaaacagctttttacgtagctcgtgcgcattagtcaggttgccattatgggccaacgtgatgccatacggcgagttaacgtaaaaaggttgcgcttccgaagcgctggagctgcctgcggtagggtagcgcacatggccgatccccatgttgccctgcaaacgctgcatgtggcgagcttcaaaaatatcgttcaccagcccgtttgccttacgcaagcggaagcagttattcgcatcaatggtgatgataccggcagcatcctgaccacgatgctggagcactgttaacgcgtcataaatcgactggttgaccggcataacaccggcgataccgacaataccgcacatacgtcattttcctcgttaagccacatctcagaacctgttacgtcctgggcaagaaactcgacgagctttgcagatagtcaaagcaccatctgatgatgaagctgaactgcgggatgagctgcgatttgctccagtcttcgcttttcgacaagccggtaaaggtatcaaggaagaacagaatggcggcgacaatcagcgcgcctcgcagtgcgccgaaacagatccccaacacccggtcagttcccgacaggccggtcttttctactagctgacctatcacaaaattcacgatagcgccgacgataagcgtcgcgataaacagtaccgcgatagcaatcccattacgaaccagttcgtcttcaaagcccgtaaaccagacagacaggtaagtgtagtagtgactggcgacaaagaaagcacaaccccacgtcaccagcgataacgcttcacgaacaaagccgcggatcaggctaaccagacaggaaaaagcaatcaccgcgataatggcgtaatcaatccagaccatagatgtcccacgattttacgccctgtcgtcctgttcggggcgcattctaacagaaaaagaaaacgtttgcgtagggatttccttcccacgcgtaaataaaaatggcgctgaaaaaatattcaacgccatcacactttttatctcttcgggcacgaccagaagagctgccatcggcctgataagcgcaggatacccggttcattccttctgccggatggcggcgtaaacgccttatccagcctacagaacttcggctattaccagatgaacaccgtaggccttaacgctgcgcgctcaggcaaaacgcgccttagttcgggctatatcccatcaccacgccgcttaacccggaaatctgcttgagctcgccaagcgatcctttcatcttatctttcgacgcatccggcccgacgagaatacgggttattttaccctgtaccggcgttgagggggaagtataaacccggaacccggcggaacgaagcttgccgactatctcgttgactttatccgcgtttttcagcgcgcccaactgtacgacataggctttgccggtcggcgcaggtttatcgtcggcgactggttgcggcgcgggcgtcggcgtggaagcggcgacaaccggctgttgcggtttaggctgcggcttcggcttttcaaccggcttcggtttaggcgtctccaccggtatcggatcaagctcgacattgttagacgccatgcgcgacgggtccagcgacggcgctgccgcatctcccgcccgcacctcttcagccgccccttccggcggctgtgtcggcagcgcctgcgttgcggcaggcatcatatccggctcatcgcggtcgccaggcttcggtaccagtggaatcgcagcaaattcatcctgataatgctttttctgtccgtccagcagaccgggaagcacaataacccccagcgcgactaacacaatcgtgccgactaaacgattctgaaacttactcgccaccgattctccccgcgtctatcacttccataacatgtgcgacggtgtggaacgatccgcacaccagcacggtatcttctggctgcgccgcgtcgatagcggcctgccatgcctgcgcgacgctatcatagacattccctttccccagatgttccagaagttgttccgccgtcgcgccgcgcggcccctctaacggagcacaataccagtcgtcaaccacgcttttcaaccaggctaacgtgccggcgatatctttatcatgcagcataccaatcaccgcaagcacgcgcccgcgtttcggcaacattttcagacgacccgtcaggtattccgccgcgtggggattatgggcgacatcaaagataacgcgcggcgactcactcacgatttgaaaacgtcccggcaaggtagcctgcgcaataccgtcgcgaatcgcctgctcgtcaatattcaacctgctggcgcgcagcgcggccagagcggtggcggcattcggctgaggaacctgcggcaacggcagtccggcaagcgtgccgtcgccatcggtaaacgcccagtgggtcgctgtcacctcataacgccagtcaacgccgcgacgccgcaacagcgcgccggtctcctgcgcgacatccgcgatggttgccggcatttccggttcgccgacgatagcgggtttttccgcacgaaaaatcccggctttctcgcggccgatactttcgcgatccggccccagccagtcagtatggtcaagcgcgatgctggtaattaccgctacatcggcatccacaatgttcgtggcgtccaggcgcccgcccaacccgacctccagaatcaccacgtcaaggttagcctgtttaaacagccacaatgccgacaacgtgccatattcaaaataggtcaatgaaatatcgccgcgcgccgcttctatttccgcaaaggatgcggtatgcgcggattccgctaattctttcccctgcacgcgcacgcgctcggtgtaacgtaccagatgaggcgaactatagacgcccacacggtatcccgccgcgattaacaccgactccagcgtgcgacaggtcgtacctttgccgttggttcccgcaacggtaaaaacgaacggcgcaggcttgaggatgtccagacgcgctgccacctggcttacgcgctcaaggcctaaatcgatactcttgctgtgcaggttttccagataagaaagccacgaggccaggggcgacgcagcttgaggtatagatttgtttttcattgtttccgctgcttctttacggtgaaaagcaaaagggcagagcctgcggccctgcccttttcagttatcaggcctcagactcctgatccggcgccggaggcaccaccacgccttcacgcggggcgtccgggttcggcgcgggcagattcatcagcttcgccagaatgctcgccagcttcaggcgcatttccgggcggcggactatcatatcaatagcgcctttttcgatcaggaactcactgcgctggaatcctggcggcagtttttcgcgaacggtctgttcgataacgcgcgggccggcgaagccaatcagagcttttggctcggcgatgttgagatcgcccagcatcgcaaaactggcggaaacgccgcccattgtcggatcggtcaataccgaaatgtagggcagaccacgttcctgcattttagccagcgccgccgaggttttcgccatctgcatcagcgacatcagcgcttcttgcatacgcgcgccgccggaagcagagaaacacactaacggacagttgtcttccagcgcctgttcaacggcgcgaacgaagcgtgcgccaacgacagaccccattgagccgcccatgaacgcgaattcaaacgcggcggcgacaaccggcataccgtgaagcgtccctttcatgaccaccagcgcgtctttctcgccggtttctttctgcgcggacgccagtctgtctttatattttttggagtcgcggaacttgagcacgtcttttggctccagctcgctacccaactccacaagggaaccttcatctaacaggctatgcaggcgattgcgcgccgacatgcgcatatgatggtcacacttaggacagacctcaagattacgttccagctcagcgcggtataaaacctgaccgcagctatcacacttggtccacaccccttcaggaatgctagccttgcgggtgggagtaatgttgcttttaattcgttcaatccagctcattggtgacctttctgcctgaaccttagtcagctttattataaggggcgcataatgccatttttgcccccaacagaccatgaatgttgcacattaaaacataacagcccgaaactttggataaaaaagtggtcgaaccgctgagttactttctattttgcggcacgcgacgcagcgcgcttatgccggacaatctcaatgacgccaggtaatatcgaaaccacgataatccccacaatcagcagcttaaggttatcctgaatcaacggtatcgtaccgaagaaataaccggcgtaggtaaagagcagcacccacagcagcgcgccgatgacgttataggcggcaaaatgccgataggacatgtgccccatccctgccacaaacggcgcaaaggttctgacgatcggcacgaagcgagcgagaatgatagttttaccgccgtgtttttcataaaactggtgggttttatccagataactacggcggaaaattttcgaattcggattactgaacagtttttcgccgaacagtcgaccaatcgtgtaatttaccgcatcgccgacaattgcggcgatcagcattaacgccaccatgacatgcacattgagatcgttggtttccagcgaagccagcgccccggcgacaaacagcagcgagtcgcccggcaggaacggcgtgacgaccaggccggtttcacaaaacagaatcaaaaacaaaatagcgtacacccagacgccgtactccgcgaccagctccgccagatgcacatcgatgtgcagaataaaatcaataataaagtagatcaggtccatatttgtctttgcctttctacccgacacgtttcgggtgtgcgattcggattagtccgccagaaatagcgggcccattggcggttttggaaggtcaaaccggtcagggtaatccaccgcaaccaaatatagcccttccgccttcgccgttgccgccgccagcgttctgtccctggccgctaacagctctgcgatccagctctccggctggttgtgagcgcctacttccagcaggctgccgacaatattcctgaccatatgatgaacaaaggcattcgctttgatatcgaccaccacataagggccgtggcgggtaacgttgatgtgcatcacattacgccacggcgtgcgcgactggcactgcactgcgcgaaacgaggtaaaatcattttcgccaagcagacactgcgccgcgcgatgcatccgctctgcatccagcggctcatagtaatgcgtcacgccttttgctaataccgcaggacgcagtcgatgattgtagatgatatagcgataacggcgagccgtagcgctaaatcgcgcgtgaaaatcatccggtacagttttcacccagcgcacggcaatgtcaccaggcaaattcgcatttacccccagcgtccatgccgcatctttgcgcaatgcggtcgtttcgaaatggacaacctgcccggtgccgtgaacgccggcatcggtacgcccggcgcagaacacgttaataggttcatttgccacctgcgagagcgctttttccagcttttcctgcacgctgcgcacttcattctgacgctgccagccataatacttgctgccgtcgtactcaatacccagcgcaattttatagaccgccgatgattgctgtccggacatcagtacagatactcctgcaccagcttctccgcaattttaacggccatcagcgcgccgccgaaacgcacgttgtccgccactgaccagaactgaatttgttccggcataccgtaatcattatgcacacagccaatagagagctgtggattgccggaagcgtcgcccacctgcgtcgggtaatccgtctcttctgacagtacgatatcttcaccgcgggaaaatgcctcgcgcgcctcttccgccgccagcggacggagcgcttcaaagctcaccatctgcgcatggccatagaacaccggcgactgcacgacactggcggagatcatcacgccatcgtcctgcaaaattttacgcacttcatcgacgatacgacgttcctggcgcacgctgccttcccgatccggcagcagcggcagcatattgaacgccaactggcggccaaagaaatcatcttcatcaatcggtatgccgttaagcaacttcgcactctgtccggccagcgcatcgaccgcttttttcccctgtgcggacgctgataacatactggtgacggcgatgcgcgacagtcccccctgatcgattaacggcttgagcgccgccagcagttgactggtcagactatcggcgaccgcaatcacgttacggttacggtaatccgccagtacatacgggttaacttccggcacgaccagcggcacatcaggctccagcgcgaacagaccgctggaatctatcaccaggcaacctgcattagtcgcgtcgtctatccaggcagccgatgcctctgcgccggcaacgaaaaacgccaactgcgcctgcgtccagtcaaagtccgccgcatcctggacaatgaccgacttgccaccaaaacggaggtgctcgcccgcgctttcatgacgcgccaacgcataaatttcaccgaccgggaactggcgttcagccagtgtttcaagcagggcttcgcctacggcgcccgttgcgcccagaatggcaatgttccagccttcagacatggtgatttactccagaaatacataagcgtccctgtcgcattattcgacagggagcattaagaagacattaatgtgccgggtgatgaacagcgttaaaacctagcttacacagcaaggcggctgccgtttcgtcgtcacacatcacgtataaagacgaccattcacggcgctcaagataatttttacgcaatttatcaaattcacccggaattccagcgactttacgcagtggcgcatcgtcgcggcgcacatcatacaccaaatgcgccagtcttttcagcgtcggttgatccagcgggccatgaagcgtaatacgaccaaactcaggcgcaggcagtaatgtctccagcgcgacacgctgctcgcgaccgataaacgcgctatacgcctcaaagacctgggtggtgccgcgcgctttgccttccagcgtatagccggcaatatgcgacgtgccgatatccacggcttccagtagcgcgacgttaagatccggttcgccctcccacacatcaagcaccacgctcagcggctgcccggcattaagtcgcgccagcaacgcggcgttatccaccaccggaccgcggcaggcgttaatgagaatggcgccgggtttcagtcgacggatcagcgtctcatcggccagatgcagcgttttgtacggtccgtctttatagagcggcgtatggaaagtcaggacatccgcttcctgcaccagctcatccagcgtacgaaaatcaccctcgtccccgcgtgcggcgcgtggcggatcgcacagcaacgtgcggatacccaacgcttcaagcctggtctgtagccggcttccgacgttacccacgccgacaatccctatagtgcgatcgcgtaacgaaaagccgtcacgttcggccagcatcaacagcgcggaaaacacatactccaccacggcgatagcattacagccgggcgcggctgaaaaaccgatgcccgcctgcttcagccatgcctcatccacatgatcggtgcctgccgtagcagtaccaacgaagttaatcggcgtgccgctcagcagcgattcattcactttcgtgaccgaacgcaccattaacgcatcggcatggttcaattcttcaacggggatcgggcgacccggcacttcctttacctcacccaggcggctaaataattcgcgggcgtaaggcatattttcatcaacgagaattttcacgactgtcgtacctgtttgagaacgagagttaaccggacaagtgtgccataatctggccgccaggcatatattgctcagatttatggttaaaggataattaattatgcatcccatctccggcgcccctgcacagcctccaggcgaagggcgtaatcctctttccgctgcgagcgagcagccgctttccatgcaacagcgtacggtactggaaaggctgatcacgcgcctgatttcactgacccagcagcaaagcgcggaagtatgggccggaatgaaacacgatctggggataaaaaatgacgcgccgctactgtcgcgccacttccccgccgctgaacagaatcttacccagcgtctgggcgtagcgcagcaaaatcacgccaatcgtcaggtgctttcacagctaacagagctgcttggcgtcggaaataatcgtcaggccgtcagcgattttatccgtcagcaatacggtcaaaccgcgcttagccagcttacgcccgatcaactcaaaaacgtgctgacgctcctgcaacaggggcagctttccattccgcagccgcagcaacgtccggcaacggatcggccattattgcctgctgaacataatacgttgaatcagttggtgacgaagctggcggccgcgaccggcgagtcaaacaaacttatctggcaatcaatgctggaactctccggcgtgaaaagcggcgagctcattccggcaaaacagtttacccatctggcgacatggctacaggcgcggcagacgctgtcactacaacacgcgcctacgctacatacgctgcaggctgcgttaaaacaaccgctggaaccggacgaactcacagcgatcaaagagtatgcccaacacacttatcaaattcagccgcaaacggtgctgaccaccgcccaggtgcaggatttacttaaccatattttcctgcgtcgcgtagagcgggaggcggatgagctcgaaccgctctctattcaacccatctaccgcccgtttgcgccgatgattgaaaccgtgaaaaatctgtctgcgcgaccaggcctgttgtttatcgcgctaataattgtactggcgcttttctggctggtttcttaaccgcgccggaacgataatatcgtcaccaggatgccaaccaccgcggagatcgctcccgcgaggaatacggaaggatagccgtatgacgtggccagcatgcccgccagcgggccggtaacgccgtaggagatatcctgaaacgcggcgtagccgccgagcgccgtaccgcgtacctgtgcaggtacgcgtttcacaacctccacgcccagcgccgggaaaatcagtgaacaccctgccccggtgagcgccgcgcctaccagcgctatccaggccgtcggcgccagccacaagagcagcaaccctgccgtctcaaccagcaatgagacaacggcgaccttcacgccgccaaagcggtccggcatccaaccgaacaatatgcgcatcagtacaaacgcaccgccaaacgcggtcagggtgaatcccgccatcgtccagccattgctgacaaaataaagtgaaataaacgtaccgatgacggcaaagcccacgccctgcaatgccaggcccaggcccggtttccagataagcccgaccacgctccacagtgaaggtcgctcccccgtatacgcaggcactttacgcacggtgccgttgaatgcccaggccagcagcggtaaaaccatcgtcgtccccgccagcgccgcgaagccaaagtggctatggatcagcaagcccaacggcgcaccggccgccagcgcgccgtaaatcgccatcccgttccacgacatcaccttaccggaacgcgttgggccaaccagccccagtccccaggtcagggttccggtcagcagctggctttcgccaaatccgaggatcaaacgcccgacaataagcagcgcgaattttactggcgcggaaaccggcaacagcgcggccaggagccaggcggcgcccgccagcccgcaggcaagcatcccctgtaacgccgatcgtttagcgccatattgatccgccagccgtccggcatagccgcgcgtcagtaccgtcgcaaaaaactgaatgcccacggcgatcccaaccatcgtattgctatagcccagttcgtgatgaacaaaaagcgggatgacgggtaacggcaggccgaccgtcatataggtcaggaaaaccgcaaaggcgatgcggaacagcgaaaaattcgcagacggggtcgttgttttttggctaactgctgtcatgcattactccagaatgcagagtaaggcggggaaaggccacgcccccctctacctgaacgtcaggattaaggtgcgttggataacgttaaacgcttacgcattatcggaaggataatgtagaaagtgaagtctgcctgtgagacgcgaaacttgtcaaccttgaaattgcagccagggtatcaacgtggcggcgtgtcatcaaacagaaagggaaagaccgctttcatccctctcaccttaaaccgtccggtcacctgcttgcgctgttctggcgtcagtaacctgaacatcatctcccagatatcttcaggctccgcttcctgtaaggaaatgggttccggcgtcggttcctctccgctgtcgtccagataacgatgaacataaagagggaaaacagatatatgaaactcctcggcctttgatttaacacgcttacgcctgacaccctctttcccttcgctgtacttatacaaacgttcgcgaaccgcaggctcgcttcccggaaaccccggtaagccaagacattccttaaccgtgaaccattcctttgccatcggtttctttcctttcccctgatgaaataaaaatatttcttctttttcgcgaaattttgctttctttctggcactattctcagagtgaaaaagaaagtaactttctttttctcgcgctaatttttaccttaaaaatatcggtgccgataacacatcttcttaggattacagaatggaaccaaaaagccaagactggcatcgtgcagatattaaaagtgcacttgaaaaaagaggtattacgctcagagatctttctcgtcaggccggtttatcacctgattcactgcgcaatgtctttacccgttcctggccgagagctgaacggattattgcggacgcgctgggcatcacgccgaaagagatctggccgtcgcgctatgatgatatgcaaataaaaaatgatgccgatatcgcagaataatagttaatgctgaataaattggctttaacctatcaatctcaacaattaataaatatttaaacttattatattgaaaatagtaatagcactatctgtcatgcttcccgaatcaaatactgttaaagcattacgtcattgctattacgtattttattaacaggaatcattatgagttgggataaaagaatggcggttaattatgccaaaacgcatgcaggttctcattctcaaggccggtgtgcggaatttacccgaaaggcaattcaggcgggcggtatcacgctggggcatacatatcatgcgaaagattatggcccaatgttaagaagcgccggattcaccgctattggtacctatgaaatgccgcgcgagggtgacgtcatcattattcaaccttacgctggcggaaacccgagcggtcacatggcgatatacgatggcacagagtggtattcagattttaaacaacgcgatatgtgggccggcccgggctaccgggcagccaggccctcatataccatctacaggaagaattaatgaaaacgttctcccttgtcgcgcttatcctgttgctttgtagttgctctgcgcctcatcacgacagtacgcaggccgtgaagcagttctatacctcatggatgacgacgttcacgaacgatgtgaatacccctgacgacaccaccgccttaatgcaacgttacgttgctaaagaggttattcatcgcctggcgctaatacagtccctttatgaacaggagattgtgggggcagattattttatgtatgcgcaggactatgcgccagagtggattccacagttacgggttgggaaggcacaccctttcctcggcggagaaaaagtggatgttctgttggctacagagtcaacgcccatccacctggaagtttatacccgttgggaagagggacgctggaaaatttaccgcgttcgggatgctgacaggggttatgaacagccgatttatgacgcaggcgccatcacccaggctgaggcctggtcagcgaaagtcgcgccggaatataagaagcattaaaaaagggaaccgccatcggtctcttgttcgtaccggagaggttaaagcgcctcttgcatcaggctcttattccgtcgctgaaaacagtaagccgaaaacaacccaggcattatttaaaatatgaagtattatcggtatcattagcccacggcttctcattcgaacaacgcataatatcgatgaaaaaacaaacagataaacaaaagtcaccgcaaagagatattgtgtatgcataaatgcaaaagcgagtgaagtaataataataccggaagctcttgagtaccgaccccaaccgatactgctgtttaataaaaaccctctgaatataatttcctccgccacaggagccagaaagcacatcgccagcgtgttaagaaatttatgaagaaaaaattgccttgataactcggccatccagggttccgggccactaaaagcattgtagagaacggtaaggcacaccagggccagcgccggaacaaaacactccacgaatgataagcgacccaatgataaaaacgggtaatactttgaataaatactccaggcggcaatcgcatagacaaaaacaatactatatataaaaggcgcagccagacctcccaaataaagccaggcataggaaggcgaaaatgaggcaaaaacaaaaatgccgaacaaaccaaataaaacagccacacaactcaaactatgcctaattttatctaatgtattagttggcatttatataatatccatataatttgttgttccctgaatgaaaaaacaggtcgcattagcgacctgtttcattgttgatactacaacgtaatagtcaggcttacaacttacgcatcaccagcgtggcgttggtgccgccaaaaccgaagctgttagacattacggtagtcagttcacgctcggtcgtttcggtcacgatgttcagacccgcagcctgctcatccagctcttcgatgttgatgctcggcgcgataaaaccgtgctccagcatcagcagagagtagatggcttcctgcacgccagccgcacccagcgagtggccggtcatcgctttggtcgcggagatagccgggctgttatcgccaaacacttcacggattgcaccgagttctttcacgtcgcctaccggagtagaggtaccgtgagagttcaggtagtcgatcggcgtgtctacgccgtgcatcgccatctgcatgcaacgtactgcgccttcaccagacggagcaaccatgtctgcgccatcggatgttgcgccatagccgacgatttccgcatagatatgcgcgccgcgcgccagagcgtgctccagctcttcgacaacaaccataccgccaccgcccgcgatgacaaacccatcacggtgcgcatcataggtacgggacgctttttcaggcgtatcgttatatttggtggacagtgcgcccatcgcgtcgaactcacaggccatttcccagcacagctcttcgccgccgccagcaaaaacgatgtcctgtttgcccagttggatctgttcaaccgcattgccgatacagtgtgcggaggtcgcgcaagcggagctaatggagtagttcacgccataaattttaaacggcgtagcgaggcaggcggaaacgccggatgccattgctttcgtcaccacatacgggcccacggctttcaaaccacgcgggctacgcatggcgtctgcgccaaagacctggaatttcggggagccgccgccggaacctgcaatcaggccgacacgcgggttattctgatagacttccggcgccagaccggcgtcggccactgcctgctccatagacagataagcatagatggaggcgtcgctcataaagcgcacgactttgcggtcaatgaggccagtggtatccagttttacgttgccccatacctggctacgcatgccggcgtccttcagctcctgagagaaagtgatccctgaacgtccttcacgcagagatgccaggacttcctgctggttattaccgatgctggaaacgatgcccaggccagtaatcactgcacgtttcattcaatacctctgtaattcgcactatttttaagtttcgattggcacaatagcgtacacttgtacgccgaacaagtccgatcagccatttagtacggaaatttgcgccatcaggcacacatcgttaagatcgcgataccgcccgtcagacgagtaacttacgtgaaacaatacgccatacaacccgccacactcgaatttaacgctgagggtacacctgtttcccgagattttgatgatgtctatttttctaatgacaatggactcgaagagacacgctacgtttttcttggcggcaatcgtcttgcggagcgatttcccgtacattcacatccattatttatagtcgcggaaagcggttttggcaccggactcaacttcctgacgctgtggcaggcgtttgacagctttcgttctgcgcacccacaggcgacgctgcaaaggttacatttcatcagttttgagaaattcccgttaacgcgcgacgatctggcgctggcgcaccaacactggccggagctcgcgccctgggcagagcagctgcaggcgcaatggccgctgccgctcccggggtgccaccgcctattgctggatcggggccgggtgacactggatttgtggtttggcgatattaatgaattgaccgaccaactggacgccacgctaaatcaaacagtcgacgcctggttcctcgacggttttgccccggcgaaaaatccggatatgtggacgccaaacctgtttaacgcgatggcgcggctggcgcggcccggcgcaacgctggcgacgtttacctcggcgggtttcgtccgtcggggattgcaggaagccggttttaccatgcaaaaacgcaaaggcttcgggcgtaaacgcgagatgctttgtggagtgatggaacaacacctcatgccgaccctttccgcgccctggttttaccgcagtggaagcgaaaaacgtgaaacggcgatcattggcggcggcattgccagcgcgctgttatcactggcgttactgcgtcgcggctggcaggtgacgctctattgcgcagatgatcagcccgcccagggcgcttccggtaatcgacagggcgcgctttatccgctccttagcaaacatgacgccgccattaatcgctttttcccgaccgcattcacctttgcccgtcgcctgtatgatgccctgcccgtctcttttgatcatgactggtgcggcgtaacgcagctcggatgggatgagaaaagccagcagaaaattgcccagatgctgtccctggcgctgcccgccggactggcctcggcgctcaatgccgaagaggcggaacaggcggttggcgtgacgacacgctgcggaggaattacctatccggcaggcggctggctgtgcccggaacaattaactcgcgcagtcatcgcactggcgaccgaacagggtttacaaacgcgctttcgccatacgctcacgtcgctcgttgcgcaggagtcgcgctggcaactgcgctttacgtcaggtgaaaccgccagccatgagaccgtcgttctggcgaacggccatcagattaaccgttttgatcagacccagccgctgccggtgtatgccgtcggggggcaggtcagtcatattcccaccacccccgctctctcggcgttgcgtcaggtgttatgctacgacggctatctgacgccgcaaaatccgcataatcagcagcactgtattggcgccagctatcaccggggtgacgaaagcaccgtctggcgcgaagaagatcagcgtcagaaccgacagcgtctgcttgactgttttccggatgcgaaatgggccacagaggttgacgtcagcggcaacagcgcccgttgcggcgtgcgttgcgccacccgcgaccatctgccgatggtgggcaatgtcccggattaccatgccacgctgacgcattacgccgatttagccgataataaaacgtcggcggcgcctgcgcctgtgtatccgggtttatttatgctcggcgcgctgggatcgcgcggtttgtgctcagcgccattatgcgcagaaattctggcggcgcagatgagtaacgagccgattccactggatgccggtacgctggcggcgttaaatccaaatcggttatgggtgagaaagttattgaagggaaaagcggtgaagtaatgggtcagtcaatagcggaaggcggcaagcgtcgccttccggcccacggcgttattgttttgccttgtcgaacaaattgtcccacatcgctttgactaacgcctgatcgcgcggcgacagttcgccggcgccgatcgctttttccagactttggctaacgttggcatagaccgcctcaacggagtggtcatcaccgctctccagctcggcaatggctaacgtcaggtggccacgcaggtatccactggcaaaaagctcatcgtcgctggcgtgctctaccatatcgtcaattaatgccagaatgcgtgattcaaactccgcgatcatcttctttcctcattgtaaacgtggcgctggctttaattaagcgcttccggccacgggaactgttccgccttaagttcgggcgtgtgatagtaattctgtagcgctttgatgaagcgggccggacgttcaggaatgccctgctccagatacgccattacctgcgcatgaacccggcgctgaaacgccacgcgatccggttcaatatcgccttccagattgtcgcaactgacgttaaagggataccccgccgccacgcaaaacaaccagtcgaaagcctgtggcttcacctcaacgtcttcgaattgactttgggtctgcgcgtcgcgtccgtccgggcagtaccagtaaccaaagtcaaccagttcgcggcgcgccttaccggcgatacaccagtgagaaatctcatgcagcgcgctggcgtaaaacccatgcgcaaagacgatacggtggtacggtacctgcgcgtcagcaggaagatagatcggttcgtcgtcgcctttaatcagacgggtattaaattcttcggcaaagcagccgttaaaaatctcaattaactgttcgtaatggtgcgtattgttcattaattcatccccaaccagtggaggatctcctgtccgtggctatcataaagtaacctggcgctcattaccgccgagacaataacgatcatcggtctgataagcttttggcctttgctcaacaccagacgcgaccccattcgcgcccctaaaaactgaccaaccagcatcacgaagcccgtcgcccagatcactttgccgccgatgataaataacagcaggccgccaacgttggaggtagcgttaagcactttggcatgtgccgtggatttcgccaggttatagccacataaggtgacaaacgccagagcgtaaaacgacccggcggcaggcccgaaaaagccgtcgtaaaacccgacgcatcccccggctatcagcgcgaacggtaatccatacaggcggcgctggcgatcttcctcgcccagcttcggcatcaataaaaaatagaggccgatgaaaatcaccaggatgggcaagatctggcgcaaaatatccgcctgcacgtgctgcaccagcagcgcgccgctcatcgagccaatgaacgtcatcagaatattgagcttttgctcggccaggtttaccactttacggcgaataaaatagagcgaagacgagagggagccgccgcacgcctgtaatttattggtcgccagcgcgtttgccggcgacatcccggcggccatcagcgcagggatagtgagcagccctccgcccccggcgatagaatcgataaatcctgccagtacggcgacaaaaaacagcaccaccagcagcagcggggagaccataaacagatcataaaaattgtccatcagagtacatgctcatccagtagcgcctggcaggaaggcggcagcggcggcggtgtcttcttctcaggctttgtggtgccaggttttggcggttcgaaccagctttgcagttcagcgccgcatccatcgcccggcgggggtaaaggttgatcttcgcactccaggctgtcggcagggcagcgtaaacgcacgtgcatatgcgcgcgatgctggaaccaggggcgtactttacgtagccagtcacgatcgtttccggcatcgaggcaaagctgttgtttaatagccggattgacgaaaatacgggtgacgtcattgtcttgtgctgccagtttgatcagactggcgatatccgacgaccagcgcgacggcacgacatgtttaccgtcgcgggacaccagatctaacgcctgcgggcgcaatagctgcgcctggctccagcgcgttttcggcaactgcaagaaaatatccacatcaagcccggtctgatgactggcgtgtccgccattaaagcggcctccggcaggcatccccatgtcgcctatcaggacggttccgagcccccgttgctgcgcctgatgactcaaccgctggataaacatgaccagatccgggtggccgaaataacggcgctgatcggtgcgcatcacctgataattatcggactgtaccggcaacgtgtcggcgccaatgatgcatccgttggcaaagctaccgatagactgggcggcgccggggacaggatgggttattttctgccacggcgtcgccgccaggctggcgctactgacaaaccatgccagcagcgcaatcgcggtttttttcatttcttaccagcgtggaatctctgtctttacatccgcattctgtgcccgatggcgcagcaggtgatccatcagcacgatcgccagcatggcttctgcgatcggcactgcgcgaatccccacacacggatcgtggcgccctttggtgatcatttcgacttcttcacctgcccggttgatcgtacgtcccggcacggtaatgctggaggtaggtttcagcgccatatgcgccacaatgtgttgcccgctactgatgccaccgaggatgccgccagcgtggttgctctgaaaaccctgcgccgtgatttcatcgcgattctggctgccgcgcagcgccaccacgttaaatccttcgccgatctccacgcctttcaccgcattaatgctcatcagcgcatgggcgatgtccgcatccagtcggtcaaataccggttcgccaagccctgccggcacgccgctcgccatcaccgtcactttcgcgccgatggagtcaccctcttttttcagcgcgcgcatcagttcgtccagcgcgtcaagtttgtccgcatcgggacaaaagaacggattaagctcaacctgacgccagtctttaatctccagcggaatgtcgcccatctgggtcaggcagccgcggatttcgatgccgaacttttccgccaggtatttcttggcgatcgcccctgccgctacgcgcatcgcggtttcacgcgcggaagaacgtccaccgccacggtaatcgcgcaggccgtatttctgctcataggtgtaatccgcgtgtcccggacgaaaaacatctttaatcgcgctgtagtcctgcgagcgctgatcggtgttttcaatcagtaggccaatgctggtgccggtcgtcacgccatcaaacacgccggagagaatttttacctggtccggttcgcggcgctgggtagtatagcgcgaggtgccggggcggcgtctgtcgagatcgtgttgcagatcggcctccgtcaacgggatgccgggcggcacgccatcgacgatacacccaagcgccagcccgtgtgattcgccgaaagtggttacgcgaaagagttgtccaattgtgtttcctgccatcacggctccgttatcgttgttgtcgtttgcgtgttttaatctttataaatattgaaatgttcacgggccgcgagcaactgcgctttggtcaacataaagacgccatcgccgccgttgtcaaactccagccaggtgaacggcacatccggatactgctccatcagatgtaccatgctgtttccgacttcacaaatcagaacgccgtcatcggacagataatccggcgcatttcccaggatacgacgggtcaatttgaggccgtcagtgccggacgccagccccagctcaggttcgtggcgatattcgttcggcagatcggacatatcctccgcatcgacataaggcgggttagtgacaatcagatcgtactgaactttcggcagatcgcggaacagatcggaacggattggcgtcacgtgatggataagaccgtgttcttcaatgttatgctcggcgacagccagcgcatccggcgaaatatcgaccgcatcaacctctgcgtccgggaaagcataagcacaggcgatggcgatgcagccgctgccggtacacatatccagaatatatttcggctgttggctaataaggccagcgaagtggttattaatcagctcgccaatcggtgaacgcggcaccagcacgcgctcatcgacataaaattcgtggccgcagaaccaggctttattggtcaggtaggcgaccgggatacgctcgttaatgcgacgaatcactcgctcgacaatgcggtgtttttcgctggacgtcagccgcgcggtccgcatatcttccggaatatccagcggcagataaagagacggcaacaccagttgtaccgcttcatcccacgggttatcggtaccgtgtccataccagatattcgccgcgctaaagcggcttaccgcccagcgcaacatgtcctgaatggtatgcagttcacttactgcttcatcgacgaaaattttatccacgtattcctccagggcatgctcgcattaaattcggcggctagtttgccacgaagacagggataaatcagcattgacgcggcgggagaatacgaaaaatccgttttgaccgttcggatatcctccgggtcgggtaaactaaggcaaaagatcagacgagacccacgaatgaaaaagaaaacatcgctcagcgaggaggaccaggcgctgttccgtcagctgatggtcggcacccgaaagattaaacaggatactatcgtccatcggccactgcgcaagaaaatcacggaagtccctacccgaaggttaattcaggaacaggcggacgccagccactatttttccgatgagttccagccgctgctcaatacggaagggccggtaaagtatgtccgtgaagatgtcagccatttcgagctaaaaaaaatgcgccgcggcgactattcgccggaactgtttctggatttacacggcttaacgcagcttcaggccaagcaggaactgggggcgctgattgccgcctgccgtcgggaacatattttttgcgcctgcgtcatgcatggacacggtaaacatattctgaaacagcaaacgccgttatggctggcgcagcatccgcatgtgatggcctttcatcaggcgccgaaagagtacggcggcgacgccgcgctgctggtgttgattgaagtggaagagtggcaaccgcccgaattaccctgatgcggaattgccggatggcggcgcaagcgcctgatccagcctacgaacagccagcgctgtcgtaggcctgataagcgaagcgccatcaggcagcaaagattaaatcgctttcgccattttcagattgcagggactcatttgccagttgaatgtccccttgccgctttcatcaagcgtaacgttggcaattgcggacgtcgtgaacatcggcggcgtttcgcccggacaaagctcagataccaggtatccgaccagaggtaagtgagaaatcaccagcaccgatccgatctcttcattggccagcgcctggaggtaggcgctgaccagaccgacatcgccacagggcgttagctccggcaggacatccacctgagccggcagattcatacaatcgccgaccacatctaacgtctgttcggcccgaagaaacggactcaccagaacacgttcgatatccactttttgacctttcagccagttcgccatcaggcgagactcgtcacacccacaaggggtcaagggacgaaccgaatcactggcggcatcgagggctgcgtcgccgtgacgcatgataaaaacttgcatattgcaccgcttttgttaaccagtttcaccaacacgcttaccacatgcccctattggctgcggcaaaaatgcggtggccggcattgtgccttatccattcactgaatgaaacgctgttttttacctcaatggcgtaagtatagtcaatccttgattattatttcgccactaaggaggcattcagtgcggattcatattctctttgacctcaatttccctggtcagtttccccattcgtccagaaatgctccctgcgctccgccatgcgcactaattgttcacaaggcgcgtaacgaggaccgtaaagtgcggccaggcgctgtaatgtcgccaccatttcacccggcccgagagcatccatatagcggaacgggccaccgagaaacggcggaaaaccgataccaaacacggcgccgatatcgccatcgcgcgcgctgcgaatcactttttcgtcgaaacagcgcgccgcttcgttaagcattaacatgacacagcgctctgccacctgctgcgcagacaatcgactctgcccttgcacgccaataagcttataaatagcagggtcaacctgttttttgcttttacgccctttttcgccataaagatagaaaccgcgaccattttttctacctttgcgatcgtcattcaaaattgaagcgacaacatttgcaggcgcgctaaaacgttctccatacgccgcctcaagcacaggaataattttagtgcccgtgtcgattcctacctcatccaaaagttggattggccccaccggaaaaccaaattttaccagggcggcgtcaatatgttcgacgcgttcgccttcagtcagcatccgaatcgcctcattgatatatggcgcaagaattcggttaacataaaacccggctttatcactgacgactatcggggttttaccctgttttttcgccagcttaacggtcgtggcgatggtctgcgcggaagtagacgcatgaggaataacctcaaccagcggcattttttcgaccgggctaaaaaagtgcaatccaatcacctgttccggtctggccgcattcgccgcaatatcgccaatcggcagggaagaagtattggaggcaaaaatggtgtgagcagcgcaattttgctccacttccgccaccatctgttgttttaacggcagatcttcaaacaccgcttcaatgaccagatcacgatgactgaaaccacggtaatcggtcgaacctgatatcaacgccaactgtttatcgcgttcgctggctttgatatggcggcggcgtacttttgtttcaagcagatcccagctgtacttcagagcatgattgatcccctgagtatttatatccttaattcgtactggcaagccgcctttacaggccgtaacccaggcgataccgccgcccattaacccgccgcctaagatgcccacgctgttcagcgggccgggcggcgcatcgctaccgggatcttttttcacctcggtactggcaaagaaaatagcgcgcagcgcctgcgattgaggcgtcatcgccagctcgccgaaagcgcgcgcttccgcgtcatagccgctactgctgccctgcgccagtccagtttcaatcacatcaatgatccgctccgtcgccggataattaccctgcgttttttgcgctgtctttttacgcaccaggcgaaataacagcgcgcgccccagcggccccgccaggatacgttcacggaccggtaatgtccgctgcgccaggcgttcttttttagccagctcgacagccgcttccagtaaaatagtttgcggcaccacatcatcaaccagcccggctttaagcgcctgtctggcgcgaagctgtttacctgtcaggatcatatccagcgcggtactgacccccaccagccgcggaagtcgctgcgttccgcccgatcccggtaaaagccctaactgtacctccggcagtccgagaacggttttaacgtcgtcggtacagatgcgccgatggcaggccagcgccatttcaaggccgccccccagacaggcgccgtgaatggcggcgataaccggaacaggcaacgcctggatctccgccatcagttgctgtccctgacgcgccagcgtttccgcttcctgcgcgttttggcagtgacctatcatgttgatatcagcgccagcaataaagttatctgctttggctgagataaaaacaacgccctgcaacgctttattttcccggatctgcttcaggatggcgcgtacctgcgtggcaaactccgctttcagggtgttcaccttttctccagggacatcaatagcgacaaccgcgacattatccagacgcacgttaagcataaaagctgatgtggtagtcattattccgcctccagaaccatcgccgcgccaagaccgccagccgcgcaggccgtgaccaggccaaaacctccgccccgacgccgtaattcatgcaacgtttgggttatcatccgcgcgcccgttgcggcaaaaggatgcccgtaggcgattgagccgccgagcacgttgaatttagcgtcatccacctcccctgtcgcctgcgcacaaccaagcacctcacgggcaaatcgttcgctgcccagcagttgtaagttcgccagagtctgagcggcaaacgcttcatgcatgtcaaaaagcgtcagatcggccatcgtcaacccggcccgctccagcgccagcggcgttgaccaggccggccccaatagcatgtcctgccagacatcaatagcggtaaaggcgtagctgcgcagataaccaagcgggcgcagccccagctctttagcgcgggattcggtcatcagaataacggcggcagcgccgtcggtcagcggtgtactgttggcggcggttacggagccatgttttcggtcaaaagcgggacgcagtttagcgtagtccgccagcgtggaggcgccgcgaatgttgttgtcttctgcaaaggggtttttatacggcggcacataggtcgtcatcacttcttccgccagtttgccctccgcccatgcctgcgcggcgcgctgatgtgaacgatgcgccagcgcgtcctgctgttcacgcgtaataccatacgttttcgccatctgttcggcggtatcgcccatgcgcagaccggtggaatactcagcaacggcgggaggaacgggcagcaggtcgcgtaagcgcagacgagaaaaaagcgtcagccgttggcgggtcgtccgggctttattgacatcaaccagtacccgcgccagggctttactcacgcctattggcagtaccgacgacgaatctgcgccgccagcgataccggcgcgtatcgtgccggccatcaggctttccgccacattcgctaccgcctgaaaactggtggcgcaggcgcggcttacgctataggcatcggtatgaacattcatccccgtacccagcacaatttcgcgcgcaatattgggggcttccggcatttgtactacctgaccaaaaaccagttgctcaatggcatcggctggaatttcactgcgcgccagcagctcgcctaccaccatcttgccgagatcaacagcgggaataccatgaaatgcagtggcctgacgagcgaagggggttcgtaacccactgacaatagcaatgcgatcgccctggcgggtgaccaacggtaaagcctgacgcatagtactcccctgtaaaaaaataaattagtggtctgacctgatcacagtcttaaccaattttttacatttagccaagcagagagaaaagaaagtgggagctaaggcacagtgaagggaagcgacaaaaaaagaaaacgcctccgccagatgatgacggaggcgtcgtgaatgaacggattaacgcaggccgagctggaagatcagcgtttctgcttcgcaggcgaaaacaaaatcaatatccagacgaacgccttcggattcctcggtaaaggttggcgtaatttggcaaggttcagactccacgctacgcgctttttcggttaacgccgccagcgtctcttcagcctctgcgcgggtagcgaatacgcggctgtatgacgcggtgcaatcggagttgtccatgatggttccaacgtccatacagcagcaaaccggggtttcatcagcactgcatttactcattgtagatttcctctgtatttgcacccagggtgccagataaacgatggggatattttacgctcccggcattcgcctctccagtcgttaatggtgggaaacgcgttaagtgaccgaaatcacacttaaaaatgatctaaaacaaaaatcgcgcgatcgggtgaccgttaagcccgccgattttgccagccagatctcgtttctaagatcacaattgaaaaaacttataaacatacttgcaacattctagctggtcagacctatactctcgccactggtctgatttctaagtcgtaccgcagaccctacacttcgcgctcctgttacagcatgtaacatagtttgtataaaaataatcaatgaggttatggtcatgagccagaaaaccctgtttacaaagtctgctctcgcagtcgcagtggcaatcatctccacccaggcctggtctgcaggctttcagttaaacgaattttcttcctctggccttggccgggcctattcgggtgaaggcgcaatcgcagatgatgcgggtaacgttagccgcaacccggcgttaattaccatgtttgaccgcccgacgttttcagcgggcgcggtttatattgatcctgatgttaatattagcgggacatcgccatctcgtcggacgttagatgcggataacatcgcgccgacggcctgggtgccgaacgtccattttgtcgccccgattaacgaccagtttggctggggggcttctattacctctaactatggtctggcgacagagtttaacgacacatacgccggcggctcggttggcggtacgaccgatcttgaaaccatgaacctgaatttaagcggcgcttatcgcttaaatgaggcctggagcttcggcctcggctttgatgcggtatacgcgcgtgcaaaaatcgaacgttttgcgggcgatttaggccagttggtcgcggcacagaatccggcgctggcgccggtcgcgggtcagattcccagcgacaccaagattgcccacctgaacggtaatcagtggggctttggctggaatgccggtatcctttatgaactggataaaaataaccgctacgcgctgacctaccgctcggaagtcaaaattgactttaaaggcaactacagtagcgatcttcccatcgctataaaccgatttaacctgcctatcccaacggcaaccggcggcgcgacgcagtcaggctacctgacgctgaatctgccggaaatgtgggaagtgtccggttataaccgtgtggcgccacagtgggccatccactatagcctggcctataccagctggagccagttccaggaattgaaggcaaaatcgaccgccggcgatacgctctttgagaagcatgaaggctttaaagacgcttatcgcattgcgttgggtaccacctattactacgatgacaactggacgttccgtaccggtatcgccttcgatgacagcccggtaccagcgcaaaaccgttctatctctattccggaccaggaccgtttctggctgagcgccggtacgacttacgcctttaacaaagatgcgtctgtcgacgttggcgtctcttatatgcatggtcagagcgtgaaaattaatgaaggcccttatcagtttgaatctgaagggaaagcctggctgttcggtactaactttaactacgcgttctaatctctttctgaaacggatcaaaaaggtgagcattgcgctcacctttttatttactgccgtttattccgagtcgatctctttgagttcgtcctgaatcgcctgcgcgttcgggttttcctgcggcttgagttttccgccattggcgataaagtcatgacgctggaagtacgcctcgcgcaccataatataaggatcggaagactggcgcagcaaaccatcggagtccagcaactgcgcgcgggtttctatcccttcgatagtccattttcctatggacattggccaggtcaaccacgagagcaccggatacaaggtatccgccatatccccgccatcttcacgcagcgtgaagctgccgtagaacggaagttgcatataaggcccataccccacgccataatggcccagcgtactgccaaagcgatgcggttcaacgcgctgcagcttaggattcgccattcccgcgacgtcaataaagccgcccatccctaataaggtattcaggaagaaacgggtgaaatgcaccataccctgataaggatcgccctgcaggaaatagttcaccatgatcgccggttcttcgaggttgccggtgaaattacttaaaccgttacgcgcaggctgtggaacataatcacgccaggcgaccgcgaccggccgaacaacatacgggtccagcacattaaagttgaagttgtacatggtgcggttaaacccttcaaatgggtctgaacgcccctgctgttctgtaccggaactcgcacacccgaccagcagtgtggttcccagcgccagcgccgacaggcgaagcttcatagatgtctccctgtgaattatggctatcgctgattgccatccatgacggaacgctaccgtatccgcctgtttaggtgtgagcgattttaacagcacgtcaaacgatgtctatatgcgcgatctcattgctttgagcatagcctggtaacgcaacaacgtgacggccctattctaacgaaacagataaaaacgagcgtgatcatttttattttttcggagaatgccccggcctgggtaaatgaaaaaccgctacgctttattaatatgtgttaatcagcagagatcatcatggatagccttaacgacgataaaattaaccggcacagcagtgacctggaagttgaaagcgaagaaaaacaaagcggtaaagagattgaagtggatgaagatcgtcttccttcccgcgccatggcgattcatgaacatattcgccaggatggtgaaaaagagatggaacgcgatgcgatggctttgctctggtcagctattgccgcaggactttctatgggggcatcactcctggcgaaagggatttttcacgtgcagcttgaaggcgttcccggcggctttttactggaaaatctcggctatacctttggttttatcattgtcatcatggcccgccagcaattatttactgaaaacaccgttaccgccgtattgccggtaatgcaaaatcccactctgagtaacgttggcctgctgatgcgcttatggggcgtagtcttattgggcaaccttattggcaccggggttgcggcgtgggcatttgaatatatgcctatatttgatgaagagacccgcgacgcctttgtcaaaattggtatggaggtcatgaaaaatagcccaacggagatgtttgccaacgcgattatctctggctggatcatcgccacaatggtatggatgtttcctgcagcaggcggggcaaaaattgtggtcattattttgatgacctggcttatcgcgctgggcgataccacccatattgtcgtcggttccgttgaaattttgtatttggttttcaacggcacgctgccctggagcgactttctctggcccttcgcccttcccacacttgccggaaatatctgcggcggcacctttattttcgcattaatgagccacgcgcagatccgcaacgatatgagcaataaacgtaaggaagaagcgaggctacgcggcgagcgcctggaacgggagcggaaaaaagcggaaaaacagcgctgagtggcgacggtttaaccagtcaggcggcgctacacttactccggcgaataaaaaacgctatactggcgccgcgttgtccccttagttaaatggatataacgagcccctcctaagggctagttgcaggttcgattcctgcaggggacaccattgatacccaggacattctcttcttgctgcataacctttcgagcggtttccctttcatgttgcttttattgcccctatgcaatatcaccggacatgccatacgttcagcaaaaagtcgtcatcggccggttatgaccgatgacatcccgatgtggtctagaagcgatactgcaaccccgcggtaaccgtatagttattattagctatacctgcggcatcgccaccaaaatacgccgtatcaccgctggttttatctatgatttgcgtaccgcccttaccttcttcatatttactgtaagcaaactcagcaaagatttttgcattactggtaatataatatccggcgtcaatagaagcgccataatatcgtgaattttccgttttttcacggaaggtaagtttgcgcatgtagtgttcgtcattatcatgcgcatttacccagtcgctgtatttaaacagtacattacactcaaagtcattaatacgataatcacccgccagcccgatatagggcatttcgaaacgctggctataacctatgccgcgcacgccatgaggaaaattaccaatatatcgaccattatcataaatataagacccgcctcttgccgtccagctaaaacgggtttcctgatagcccgctgttacgcccgccttgtagttatcgccctgcaataaccaacctttcacgttcaaatcgtattcattagcatagttgacgctggtgtccggatgaattgaacgatcggtccagcctggctgctcactgctcatccagtcatggtcaaccatatgacccgatcccgacgccaaagacgtccagccgcgggcgtccagcgtcatgaacgaatagggttcccatgataaatccccctgcaacgtggcgacattttttattttccaatccagttgactcagcttccgcccggtgtcggtatcataaaccagctccctggatttaccatttaacacacccacggaaagggatgtcgtgacgctatcaggagagacgtccggaataaataaggcagactccgcataaaccgactcagaaaatacggcgatcatcattactgcaatagcatgttttttcatttctcttgtcctcatattcagatgtaatctggagaggtgatgaagttttcatcttgtcaaatcgtcggacaagagtacatttattacgccagagaacttgacgcatttttaccttatattgaagttaagaaatagaatttgatgctcaggtgaataataagcaatctataatcatgatggaatgatttaccattacggtgatgcgacgttatctggctaacgacatcgttgctgatgttgtcagccagattgaaagtaactgtaatatcagaatttataatgctctttacttagaccatattttttcatgcgcagataaagttttttacggggaatttgcaggtactccgccacttcattaattcgtccctgatgaatatttaatgcttcggtaatgatttgtcgctcatactcttcaacgcgccggtcaagcggggtcggctcctgaagaagcaactgcgggttgaccgtttccgccagcggcagcacgccaacagcaaaaagctctgccgcattagccagttcgcgcacattgcttggccaggcgcgtcgcattattcctttcagtaattcccccgctatttccggcactggatgattgagtcgcaggcaggcttttcgaagataatggcgaaataacggctcgatatcatccggtcgctgagaaagagactggcaggcgatttgggtcatggcgaaacagtagtaaagctcggctgcaatctggttagctgccgcctgctccaccagcgaagcgctgccaacgcccaccaaacgaaaaggccgatgctccaggctttgtaaacgcgccagatggtgctgctgttcgcgtgtcagatattcgggatgactcaacaccagcgtgcctccttgcgcctggtcgatgaatgtctccaactgcccggcattctccggcgtaagttcatagcgtacaaacggccctttcgcgttacgccccagttgatggagataacgggcgccagtcatacgtccagtgccatgctcaccgtaaaaccatacggcaatgtccgtttccgccagttgttgtaaccgttgtcgaaactgattcatccactcgctgcgcccaatcagttcaacctgtaacgtctgctggcaatattgccgccgtgcaatgaccgaccggcgctggcgtagcgcgtcttcaattaatatcaacagcttgcccggatcgacgggtttttgcagaaaatcccaggcgccctttttcaccgcatcaaccgccatcggtacatcgccatgtccggtaatcaataagattggcagttgatcgtcatcctgatgaaacagcgtcatcagatcgataccggaacaccccggcatacacacatcgctcaaaacgatcccctcccaatccgcttttacccactctttggcctcgaaaggatgggtaaagccacgcacgcggtagcctgcctgctcaagcatttgggtataggcgtcaagtacatcaacgtcatcatcaatcagcaaaatagaacattcatcattcaacatcatcgacatccgttaccgagaattgcagcaccacgcaagcgttacgcgtcagcgtcgacgccagacgcaggtcgcccttcatttgcgccatcagcgacacgctaatcgacagcccaatacccaacccgacagctttactggtggtaaacggcttgagtaaagagggcaacagcgccacaggccagccagggccgttatctgcaatataaacctccagcgcctctccctgcgtctgccacgtcaccgcgatcaccgcatcatgcgaacaggcgtcaagcgcattcgccagcacattcaccagaacctgctgaatacgcacttcatcgccgctaacccatacggtgtcggttggcagtgaaagcgctccctgccgggattggtggcgcatggctaataactcccatgccgccacaaaggtttggcgcagatcaacgggatacaatggcgtttccagctccgcccgacgggtaaactgccgcagcgaacggataatggcgtcaatccggttaatgagcccttccgctttggtgagcgtatttctcgcctgtccgctctgaccttgttcaatcgcgcgtcccgccgtaaataaatacattgaaagcgcattcagcggctggttaatttcatgcgccagcgtggtcatggtctggccgactaccgccagtttcgccgtctgaatcaactcatcctgcatggcgcgcaggtcggcttctatctctttgcgctcggcgacctcttgttcaagctgcctgcgttgcatattgagctggcccagcgtatgacgtagcaaacgggctatccgtcctagctcatcgcgcccgtaaaccgggatagtcgagtcggttctccccagccctatctgtaccacagcctgattaagcgcggtaaaacgcttcaccagtcgggaacggataaaatagtggttgagtccccaggccagtagcaacgccaggagcgtcgccactaaaataagcccgccgctaacgcgaacaatctgttccaggcgttgattgaacgtctgcatttgctggtgactactacctaactgcgcctcaagcagcgtgcgaaagcgccctagcgtagcctctctggcgcggctggcgtccagtaaggctttttgcgccgcaacataatcgcgcatggtatcgggcatcttattttttaccatcccgatttccaatagttcgtcgatggtttgccgtagcgtgatcgtactgggccagtcatccagcgcacgaatattctcatccgccgttttttttaggttttccagatagcgaatatgggtctccaccagcatcccgtcattattgccggacttgagctcattcaatctgtcgcgcaggtcgtcaacaatctgattttcaattcgcgccagggtatatacctgctgctgctcgttctgcacctcgcgcgaacgttgcaaatactgcgctgcatcgccctgattcgcctcaatttgatcgagcagcgtcccctgctgccaggtaaaatcctgtaccagcgaatttagctccgtggtgaaatcatcatggagccagtcaatgcgagcggaaagctcgctaactttctcccgcaccaaaaacatgttgtagagggcattgtccagctccgccagcaaggtccggctatcctgtaaaatgacggccagttgccggcgctcagcaagctgaagcccctgactgagacgctcaatcttatccagatgctgaataatctgcgtacgtaactgcaaacgtaccgtcgtgttcggcgccagcaaaaattcattgagttgatccacggccagattcaggttcccctcaattaaaaaagcggagtggatgcgaggaaaatattcatcaagcgaatagcgaacctgcgaactttgctcatgccaggaataaaggctgaccatactgacaatcagcgtcagtaatgcgcccgttaaaaatgcgccccgtaaactgttgctgatactgagctgacgaagccgttgcaataatctccccttcatttcagctcttccagtttgtgaatcgccagccgctgattgttcagaaaccagatctgccactccatcattttttgttcggcaaagcttttattatcaaactgcgccagccaggtttcatcttcgctgcttgccgcatccaccgggacgctggtcaataaggctctgatttcaggtaaggggcgtttaagccgcgtttctgcgctgtgcaacgctcgccatgcatctttaagctgcgcgagacgaaaactgatcgcggtatcaaacatgcgttgtaccagttgctgacgcttcaggatcagacgatagttcaacggcggctgggccatcaaacgctgttgttgcgcggcgcgaggattatcggcgctaagcggtgcgacgggatacttaccggtattcgcgtcagccagtatcctttgccctttcggacttaataagtaatgaataaaagcacgcgcttcgtctgcatgacggctgtttttcaacaccgcgacgtaagtgggcgacaccgcagaatacgggaaataggtaaaagcaagattaggatcgttaagtagcaaattagcatagttatcaatgaccggcccggcaacgccaagcccgcttttgattttatccgctacgccgaaactgcgagaggaaatcgtgaccagattacccgagattgccagcagcgttgcccatcctgccgtccagcctttttgctgcaacagcgactccaccatcaaatgattcgtgtctgagcgtgacggactgctcattaatagagcgccctggtaactgggcaggcccatatcctgccagtcggcaggcggcggaagatggcgcgcagcgagcgctgaacggttgatcaatagcccaaatccggataccgctaccgccactgaagttgagcggatagaacgcggcaccagcttctggctggcggcaggcgcgctatccaatagcgccagcttttggtgctcctgaaggtgttgcaacagcatgggggatgacgtcaggatcagatcgacattttccgcattcgccgtatcaagtaattgctctaaagaaccgctggtacggttgagcgtacgaatcatgacggaacccggctccgtctgccagcgctggataatccaggcggtcgcgctgggtgaaaaggtcgttgccatcaccagctcgcggctgtacgcctggcaagaaccgaacattgccgccagccatagcgtaaaagcgcccactctggcgaaacgactacagcatgagaaaagtcgatttgtgatcccgttcataaatatcgatatcacataaagaaaatattgagacaaaacttacccttttatttctgttggcatccagaacaacgttatttgaataataacgggtccgtcgcccgaaaacatcaataaagcgtatcagatcactggcagcaaatttgttaatatccgcacatgctaacgataaaacggccatgccaataattaaagtttcaccacacccttcaggatgggtcaaaaataacctttaaattcacccaattgagtcaattttgacacatttcttcgacttgaattttattgtcactcctttcactctaccgacaaaacctcctgatgttcatctcactataaaatacaggtgactccatgttaacaatattaaaaacagggcaatcggcgcataaagtcccaccggaaaaagtccaggccacatatggtcgatatcgtatacaggcattgttaagtgtatttctgggatatctcgcttactatatagtcagaaacaacttcacattatcgacgccttatttaaaagagcaattggatctcagcgctacgcaaatcggcctgctgagtagctgtatgcttattgcttacggaatcagtaaaggcgtaatgagcagtctggcggataaagccagcccaaaagtcttcatggcgtgcggtctggtactctgcgcgattgttaacgttgggctgggattcagtagcgcattctggatatttgccgctctggtggtcttcaatggcctttttcagggcatgggcgtcggcccctcgtttattactattgcaaactggttccctcgtcgggagcgcggacgcgtaggcgccttctggaatatctcgcataacgttggcggcgggatcgtcgcgcctatcgtcggtgcggcttttgcgatattgggcagcgaacactggcaaagcgccagttatatcgttccggcctgcgtcgccgtcatttttgccttaattgttctggtcttgggaaaaggttcgccgcgcaaagaaggtcttccctccctggaacagatgatgccggaagaaaaagtcgtactgaaaacgaagaatacggcaaaagcgccggaaaatatgagcgcatggcaaatcttctgtacttatgtgctgcgcaataaaaatgcctggtatatttcgctggtggatgtcttcgtctatatggtgcggtttggcatgattagctggttgcctatctatctgttgacagtaaaacacttttcaaaagaacagatgagcgtcgcgtttctctttttcgagtgggcggcgattccctccacgctactggcaggctggctgtcagataaactgtttaagggccgcagaatgccgttagccatgatttgcatggcgctgatttttgtctgtctgatcggatactggaaaagtgaatctttgctgatggtaacgattttcgccgccattgtaggttgtctgatttacgtcccgcagttcctcgcgtccgtacagacaatggagatagtccccagctttgccgtaggttccgccgtcggtttacgtgggttcatgagctatattttcggcgcctcgttgggcaccagcctgtttggtgtaatggtggataaacttggctggtacggcggattttatcttctgatgggcggcatcgtgtgctgcattctattctgttacctctcccatcgcggcgcgctggaactggaacgccagcgccagaatgcgttacataatcaggactcactgcagcttgcggacgcgcaataaacgattagccttcctggggaacagaagcgccgacattgtcggcgctatctattcactggcatcgtatatacccaaaataattcgagttgcttaaaggcggcaagggagtgagtccccaggagcatagataacgatgtgactggggtgagcgacaaatctgccgggagcagatttgaacgtcacgtgcgacggcccgtcagagcgaggcccatcgatgggccgagtaatccgtagccaacacatcagcaacttgaagtatgaagggtatgtactgactaacgcttaccgtatcccaccataaagcgaataattaacccacatgccggtgcgagaaaaagcaataatccgctaacgatgtcatcgccatcctgcaaccatacattgagtaaataaatcagcgcggcaaggataaccattcccgtaaaagaagaaaccgcagaaaaagcccccatcacctgaccgatatagccactcacggcaagtatacttattgcaagaaatgtccataaatagatcatctataatacctcctgtctatggcaaggcttccatatagccttacggtccctctcacttctcctttaagataaaccttatcagcccgtcatttccataacatttatctcacattttatttttttaatcatttttcaatgaccttcgtctgaaataaaattatcactgtaaaaacaatgcattaaaaataatgattagcttatttttgctacgggagaaatatttacgcttcttgataaagaatttctgggcgcgagtaaataactggtggtacattagcctgcctggcgttcatgccctcgtggtttagtactgacttagttttacactccttacgggaaccattgtcgtacatgatggcctaactatacgtaaatcattcaagttaccctgatgagcttactcaagtaagtgcttcggataagcgaacgcaacttgaaggatgatgcgtatttcagagtgtaccgctgcggataatgactcttctgcgatacattattttcgtatctacagaaggtattttatgtttcctcaaagcaaattttcacgcgcgtttttgcacccgcgctactggctgacgtggtttggcgttggcatcctctggttactggtgcagcttccctacccggttttgcgttttctgggcacccgcaccggtaaactggcgcgccccttcctgaagcgacgtgagtcaatcgcccagaaaaatattgaactctgttttccgaccctctcccgggaagaaagggaaaaactgatcgccgagaatttccactctcttggcatggcgctgcttgaaacgggcatggcctggttctggcctgatagccgggttcgcaaatggtttgatgtggacgggctggacaaccttacccgtgcgcaggcgcaaaatcgcggcgtaatggtcgttggcgtgcattttatgtcgctggaattgggaggccgggtaatgggtctctgccagccgatgatggcgacctatcgtccgcataacaatccgctcatggagtgggtgcagacgcgcggtcgtatgcgctcaaataaagcgatgatcggcagaaacaatctgcgcggcattgtgggcgcgctaaaaaaaggggaagccgtttggtttgctcccgaccaggactacggccctaaaggcagctcctttgcgccatttttcgcggttgaaaacgtcgccaccaccaacggcacctatgtactgtccaggctgtctggcgccgccatgttgaccgttacaatggtaaggaaatccgataactcgggttatcgtctgtatattacccctgaaatggaaggttacccggcagatgaaaatcaagccgctgcctatatgaataaaattattgagaaagagatcatgcgcgccccggagcaatatctctggatccatcgccgtttcaagactcgcccgttgggggaagcgtcactctacatctgaaaaaggccgcaaggccttttattttggcatttcgcattgtcataatattcatatcgtaaattactcattcctgcttttagcgataagtctcctgtttacaggcgattttttactgtgtcggcggcgtcgctcaatagcgattcatcactgtcagaaattaaactgtcgccgattcccgacacttgtaagttactaaaagtaaataagaaaatgcctcttgtttcacctcatttttaggcgtacattagcgccgtctggagcgatgacgcgcagaattctgaggtgatgcaggcggtcgaaacacgaataattctcaatttcgtattatccggcatcaactctctataatcaggtaagtgtaagttcatttaggcgtacgacaggtacgcggagagatgaaacgtgaaatatttctttatgggcatttcatttatggtcatcgtttgggccggtactttcgccctgatgatttaaaagtacaatgcaaagaaaaacaggagccatggggctcctgtttgcttttctactccgtgctcgcttcaacgggttttggatgtgacggcagcacgccatcggcgcggaacatcgctttaatccctctgacggcctggcgaatgcggtcgcgattctctattaatgcaaagcgtacatgggtgtcgccataatcaccaaagcctatccctggagaaacgcaaaccttcgcctcattcagcagcttcttggcaaactcaagcgatcccatcgccgcatattgctccgggattttcgcccagacgtacattgaggctttcggcatttcaaccatccagcccgcctcatgcagccccttcaccagcacatcgcgacgacgtttatactgctcggcgatatcgcgcacgcactgctgatcgccttccagagcggcgatagccgccacctgaagcggggtaaaggtgccataatcgtgataacttttaatgcgcgccagcgcgctgaccagggttttattgcccaccataaacccaatacgccagcccgccatattatagcttttcgacaatgtgaaaaattcgaccgccacgtcgcgtgcgccgggcacctgcataatggatggcgctttccagccgtcgtacacgatatcggcatacgccagatcgtgcactaccagcacatcataacgtttagccagagcgaccactttttcaaaaaattccagttcgacgcactgggccgtagggttagatggaaaacccaaaatcatcattttcggtttcggataactttcgcgaatagcgcgctccagctcgttgaagaaatccaccccctcgaccaatggaaccgaacgcacctgcgccccggcgataacggcgccatagatatgaatcgggtaactggggttcggcaccagaaccgtatcgccatgatccagcgtcgccagcattaaatgcgccagtccctctttggaaccgatggtcacaatcgcttcggtttccggatcgatatcgacatcataacgttcctgataccagtgagaaatcgcgcggcgtaaacgcggtatgccgcgagacgtggaataaccgtgcgtatccggacgctgcgcgacggtgcaaagtttttcaacaatgtggggaggggttgcgccatcaggattacccatactgaaatcaataatatcttcaccgcgccgacgcgcagccattttgagttcagcggtgatgttaaaaacatagggcggaaggcgatcgatacgcgtaaagcgacgttcagggcggaagtcagccataatatcctcagattaacgttagcgcccggaccgtccgagcgacgctgccacgatggtggctcctttagaaaatagcctgaaaattttcttcctgtcgagaggctaatgaaaatatttttagcgacaaaaaagaggaacaagcgtaaaaacttactttttaagcgtgtcagttatagcatcaaacaaatcatattattaacaaattgatatcattgaatttacgtaacgtgacgcagccgacgataatttcctgtcaataaaccttatctcaaataatccccttttgattttgtggtttttcctctttaatcaaaagccttactaacgataatggtattcgatcatgtcatattgcggtgtttttcagggatatttccccgaaaatgaggatcctttccggcaagctgccgcgatgaaaccgtaaataaggcagcgaaccggatacgtatagtaaaataaatccctgttttcgcctgactaaccgccatgacgtgatgactcaacgcgctggtgtttgacctttcgctcagcaagagtaaagtgaaataattcagacagttgaagcattcatgcacaggaaaggcaatgaaaaaaaccgcgtgaggcacgcggtttgagactgacaagagaatgtttaattgcctgataacgctgcgcttatcaggcctacagatgacacacttttgtaggccggataaggcgtttatgccaccatctggcttatagaatatgacctaatgtctggcgcagatgcgcgccggaacctaacaagccaggattatcatggacaatcagatagaccggaataccgtgtacataatctttaaagcggcctttatcttcaaagccaccacggaagccggacgctttaaaaaattccaggaagcgcgggacaataccgccagcgatataaacgccgccaaatgtccccatggttaacgccagatcgccgccaaatcgccccatgatgacgcaaaagagcgacaacgcgcggcgacaatcgatacagctatccgccagggcgcgttcggtaatatctttcgggcgcagattttccggcagacggttgtcggacttaacaatcgcccggtaaagattcaccagccccgggccagacagcacgcgctcggcggaaacgtggccaatttcggcgcgcaatatttccagaatcatagcttcttcttcgctattaggcgcaaaatcgacatgcccgccttcgcccggaaggctaatccaacgcttatccacatgcaccagatgcgccacgcccaagccggttcccgcgccatacaccgcaataggtttgccgtctaccggttcgccgccgccgaactgaattaaatgctcttttttcagcatcgggatcgccatcgacacggcggtgaaatcgttgatgatttccagatggctaaagccgagattttttttcatttccgcaatagaaaaagcccaggtatggttagtcatcgctacccagtcaccggtaatcgggcaggctatggcgatacaaccatcttccacgctgacgctatgctcatcgagataaacgcgcaccacggcctcaagactgggataatccaggccggaatacgttttggcctgcgagatttctccactggcgatatcacacagggcaagacgcgcattcgtgccgcctacatctcctactaaagcatactttgtcattcttctactgctccgctaaagtcaaaataagtctttgtcacactgtaaattcatgggggcataacaacaacggccatcaggctgactgcctataaatatagatcttcatcacagaattactttcttgtttcagcaccaattgcagcaatgccgtcgggcaggctgtgcaaaataggtatacgaccccgtgtaaggaagagattatgttccacccgcgtgcccgaacgatgctgctgctgtcgctccccgcgctgattattggcgtagcgtcaagcctggttttaatcgctgcgatgaaagtcgcgtcggtttttcagcaatttctttggcaacgactgcccaccagcatcggcatcgcttatgattcgccgttctggatagtgggtatgctcacgctaaccgggatcgtggtgggtttgattatccgttacagtcccggacacgctggccccgatccggccatcgaaccgttaatcagtatgccggtctcgccatctgcgctacccgggctgcttctcgccttaatcatcggccttgctggtggggtaagtttggggccagagcatccgataatgacaataaatatcgcgctggcggcggctttcggctcccgcctgtttccgcgtatcacggcgttagactggacgattctggcctcagcgggcaccatcggcgcgctgttcggcacgcccgtcgccgcagcgctgattttttcgcaaacacttagcggctctaacgatattcccatgtgggatcgcctgtttgcgccgttaatggcggcagcggcggggtcactcaccaccagtctgttctttcatccgcatttttcgttacccatcgcccattacacgcagatgcggctggtggacattgccagcggagcgatcgtcgcggcgatcgccattgccgccgggatggtcgccgtctggtgccttccgcgtctgcatgagttgctgcaccgcctgaaaaatccggtcctgattctcggcattggcggttttatactgggtattctgggcgtcattggcgggccgcttaccctgtttaaaggcctggacgaaatgcaacaaatggcgtttagccagacgctgggcgcgggagattattttaccttagccgtcgtcaaactcgccgcgctggtcatcgcggcggcgagcggctttcgcggcgggcgcatttttccggctgtgtttatcggcgcggcgctggggctcatgctccatgcccatgttgaggccgtacccgcggcgattaccgtctcctgcgcgattcttggcttagtgctggtagtgacgcgcgacggctggctcagtctgtttatggcggcagtcgtcgtaccggataccaatctgctgccgctgctctgcattgtgatgctccccgcctggctattgctggcgggaaaaccgttgctggccgccaaccgtcacgaaccctaatccggcgcagcgggggccattatcccccgttgcgggcttccagcgcccgggtcacggtacgcagtaattccggcagatcggcttttggcaacatcacttcaataaatgacagacgttgtgggcgcgccaaccgttcgaggacctctgccagttggatagcctgcgtcacccgccagcactccgcctgttgcgccgcgtttagcgccggtggtatctgcgtccagttccagctcgcgatgtcgttataccgctgggccgcgccgtgaatggcgcgctctacggtatagccgtcattgttgagcagcaggatgaccggcgcctgcccgtcgcgtaacatcgagcccatctcctgaatcgtgagctgcgccgcgccatcgccgataatcagaatcacccgccgatcgggacaggcggtttgcgcgccaaacgcggcgggcaaggaatagccgatagacccccacagcggctgtaacacaacttccgcgccgtcaggaagcgacagcgcggcagcgccaaaagctgctgtcccctggtcgacaaggataatatctccgggtttgagatactgctgtaaggtttgccagaagctttcctgggtcagttctcctttatcaatccgcactggctgtccggcggaacgcgtcggcggcggcgcaaaagcgcattccaggcacagttcgcgcagcgtagacaccgcctgcgccatcgggaggttgaaccaggtttcgccgatgcgcgacgcgtaaggctgaatctccagcgtgcgttccgccggtaattgttgggtaaatccggccgtaagggtatcgacaaaacgggtgccgacgcagataaccctatcggcgtcctctatggcctgacgcacttctttgctgctggcgccagcgctataggtgccaacgaagttcgggtgctgttcatcaaaaagccccttccccatcagtagtgtcgcatgagcgatgggcgtttccgccatccagcgctgcaacagtggtcgtaaaccaaaacgcccggcaagaaagtcggccaatagcgcaatgcgccgactgttcatcaggcactgacgggcgtgataacgaaaggccgtctccacgccgctttgcgcttcatgcacgggcaacgccagcgcctgcgtaggtgggatggccgtttttttcgccacatcggcgggcaacatgatgtatcctggcctgcgtgcggcaagcatttcacccaacacgcggtcaatctcgaaacaggcgttctgttcatctaatattgcgctggcagcggatatcgcctgactcatgcgataaaaatgacgaaaatcgccgtcaccgagggtatggtgcatcaattcgccacgctgctgcgcagcgctacagggcgcgccgacgatatgcaagaccgggacatattccgcgtaactgcccgcgataccgttaatagcgctaagttctcccacgccaaaggtggtgagtagcgctccagcgcccgacatgcgcgcatagccgtccgcggcataagcggcgttcagctcattggcgcatcccacccaacgcagggtcgggtggtcaatcacatggtcaagaaactgcaagttataatcgcccggtacgccaaaaagatggccaatgccgcatcctgccagtctgtccagcaaatagtcggccacggtataggggttttgcatgacagctttccttctgacgttgatattatgttgagtattaaggaatgccgatggctgtccagcacggtggggatgaaagcctggaaaacaatgtttacagcggcaaacagtaaaagccggataccgcctggcgagtgtaaccgtatacactatttattcacgccacagggggaaaggtcatgatttatcagcccgatgagaatcgttatcacacaatggagtatcgtcgctgcggacgcagcggcgtcaaacttcccgctatttcgctggggttatggcacaacttcggcgatacgacacgggtagaaaatagccgggcgctgctgcaacgcgcgttcgatctgggcattacccactttgatctcgccaataattatgggccgccgccgggctccgcagaatgcaattttggccgcattctgcaggaagattttttaccgtggcgtgatgaattgatcatctccaccaaagcgggctacaccatgtgggatggcccttatggcgactgggggtcacggaaataccttatcgccagcctcgatcaaagcctgaaacgtatggggctggagtatgtcgatatcttttatcaccatcgtcccgatcccgaaacgccgcttaaagagacgatgaaagcgttagatcaccttgtgcgccatggcaaagcgttgtacgtggggatctctaactatcctgccgatctggccagacaagctatcgatattctggaggatctcggcacgccttgcctgattcatcagcctaaatattcgctttttgagcgttgggtagaggacgggctgctggcgctgttgcaggaaaaaggcgtcggtagtattgccttctcgccgctggcgggcgggcagctcactgaccgttatttgaatggtattccggaagattcccgcgcggcgagcggaagccgtttccttaaaccagaacagattaccgccgacaaactggaaaaagttcgccggttgaatgaactggctgcgcgacggggtcaaaaattgtctcagatggcgctcgcctgggtgctgcgtaacgataacgttacctcggtactgattggcgccagcaaaccgtcgcaaatcgaagacgccgtgggaatgctggccaatcgccgtttttcagcggcggaatgtgcagaaattgacgctattctggagggccggttttagcaaaaaatgctctccttcatgatttaagagttaaggcgatgaaacaaatctttactgctttgtaatattgcattaacaggccggcgacggctcgatcgtgaaggagagaaagtatgttcaggtcactgattctggcggcagccttgctggcttttacaccgcttgccgcgaatgcgggcgaaatcaccctgttgccctcaataaaattacagattggcgatcgcgatgattacggtaactactgggacggtggtcgctggcgcgaccgggattactggcacaaccattatgaatggcgtaaaaatcgctggtggcgccatgacaacggctatcatcgcggctgggataagcgtaaagcgtatgaacgcggttatcgggaaggctggcgcgatcgcgacgatcatcgcgggcgaggccggggtcacaaacatcatcactaagcctcctgctgaataacagcccgatgacgcccacgcatcgggcctgctatctttctgtctttatgacaaccccatcaccgttccaaccagcaaccagatattcagggcgacgaccagcacgacaattatccagccaacctgttttacccgccgcgtgttcaccagctcgcccattagcgtagcgttactggtgaaaatcaggagcggcaccagcgccagcgcaataccaaaactcagcagcacctggctcatcaccagaattcgggtagggtccagccccatcaaaatcacaataaatgagggcagcatggtaatggtgcgccgtacccacagcggaatgtgaaaacggacaaacccttgcatcaccacctgccccgccagagtccctaccacagtggaggaaagccctgcagctaccagactaagaccaaacaccgttgccgccgcatggcttagtaacggttccagcgtcaggtatgcctgatcgaggtcggcgatgccggtgtggccgctaaaatgaaacgccgccgcggcggtcgccatcattgccagattgacaaaaccggcaatcgtcatagcaatagcgacatcccatttcgttgctgagtaccgttgttgccgtgttccgccgtgcagatgctgcgttaatgacgagtgcagataaatcacgtgcggcataatcgtcgcgccaagcacgccggcggctaagaatacggcttccgggttcggtagcgccgggataaccattcctttgccgagctgcgccatatcaggctgagagaaaaacagctccacaatgtaagcggcggcgacaaaaagcagtaaaccgccgatgactttttcaagcggtttttgaccgcggcgctgtaacattaaaatcagaaacgtcgcgataccggtcaataccgcgccctgtaataaagagacgcccaggatcagcttaaaacctattgccgcgccgataaattcagctaaatcggtggccatcgcgatgatttccgcctgtacccagtaaaaccagactaccggacgcggataatggtcgcgaatttgctccgccaggttcttgccggtggcgatcccgagttttgccgagaggatttgaatcagcatcgccatcaggttcgcccagaccaccacccagagtagctgatagccaaagctggcgccggcctgaatattggtcgcgaagttaccaggatcgatataaccaatcgcggcaatgaacgcaggtcccattaatgcgagccttagcttgcgcgccgcccgtccgctgctattctctacgcgattgtcagtcatcttttgcctcaaaaacatagcctttgctatgtttcatgctatgtttattgataatgattatcaagtgcatttcaatgggtacgggtgattactttgatagtgtgaaacgatagaccgatacgatgacgacctgtatcagaacagtttggcttaacattacaagattagcacactgatataacttttcattttcatattcagtacagtaaaagtgtattacagatcactaattttgaatctcgtcacaggtccttattatagtgtgtgttggatctcgttttctttacggctgttgcatagaatgtgcacgaaaattaaacctgcctcatatttggagcaaatatggaccgcgtccttcattttgtcctggcgcttgccgttgttgcggtactcgcactgctggttagcagcgaccgtaaaaaaattcgcattcgttacgtcattcagttacttgttatcgaagtattactggcctggttcttcctgaactcggatgttggccttggcttcgtaaaaggtttctccgagatgtttgaaaaactgctcggatttgccaacgaagggacaaacttcgtctttggcagtatgaacgatcaaggtttggcgttcttcttcctgaaagtattgtgcccgatcgtctttatttccgcgttgatcggtattcttcagcatatccgcgttctgccagtggtcatccgcgctattggttttctgttgtccaaagtaaacggtatgggcaaactggagtcttttaacgccgtcagctcgctgatcctcggccagtctgagaactttatcgcttataaagatatcctcggcaaaatgtcccgtaaccgcatgtacaccatggcggcgaccgcaatgtctaccgtttccatgtctatcgtgggcgcgtatatgaccatgctggaccctaaatatgtggtcgcagcgctggttctgaacatgttcagcacctttatcgttctgtcgctgatcaacccctatgtcgttgatgccagcgaagaaaatattcagatgtcgaacctgcatgaaggccaaagtttcttcgaaatgctgggcgagtacattctggcaggttttaaagtggcgattatcgtcgcggcgatgctgatcggcttcatcgcgctgatcgcggcgctgaacgcgctgttcgcaacggttaccggttggttcggctacagcatctccttccagggcattctgggttacatcttctacccggtcgcatgggtaatgggcgtaccgtccagtgaagcgctgcaggtaggaagtatcatggcgaccaaactggtttccaacgaattcgtggcgatgatggatctgcagaaaatcgcctctaccctctctccacgcgctgaaggcattatctccgtcttcctggtgtccttcgcgaacttctcttccatcggtattattgcgggcgcgattaaaggcctgaacgaagagcaaggcaacgtggtttcccgttttggtctgaaactggtttacggttctacgctggtgagcgtactgtccgcctctatcgcggcgctggtactgtaagtctgggtttaatgcagaaaccggggagctatccccggtttttttatgccgcttatttgcctaacgggcgcgggcggccaatcagatatccctgcaaactgtgtacgccaagctgcaatagcagatcgcgctgcgcaggcgtttcaacaaactcagccacgacgctcaacgatttcgctttcgctaaatcagtgatggatttcacaatcatcgcatccagggagtccgtcagaatatcttttacaaaacaaccgtcgattttaatgatgtccgccttgaggcgttttagccgttcatagtttgcataaccggtgccgaaatcatcaatggcgatttttaggccgaacttacgcagttgattgatattgtgcatactgatttcggaatgagagaaggcctgttcttcagtaatttcgatgatgaccgaagcaggcgggacgccatagcgtttaaaaagctgcataatgcgcgacgccgtctctttttgcagcagcgtcaacggcatcaaattaaccgaaaaacgtgccccctgttccgctgaaggatgcgcggacagccattgcaggagcgcttccatcacctgcatatcaaaccgtatgctcaggttaaactgggcgataagcggaatgaactgattcggcatcatgataccgtcgtcgcaccgaagccgcgtcagaatctcgtcatacccttttccctgcgcgtcgcgaatgggttgcgcatacaaaaccagcgcgccgcgctccagcgcctgacggattttctgcaaccgcagcacccgttccgtcgtctgcccggaagcggcttcaatactctgggtcagtgcaagcacccgacggtgcgaacaggattgctccgccagccagcttaattgccccaacagcggttgcaaggtttcctggcgaccatcgaatgttccccacgatgcgccgtattccatgtccagaccggtattgttccagtaaattttgcggttattaagcacgttgagcatatattgcaggcgggcttccgtctccggtcctgtcagcaccagcaataattcactgcccggcagatggaaaattttctccttttccagcagcagcggctgcaacatgcgaaacacctcgcgttcgcaatgcacgcgcatctgcataccgtaatgacggctcagaaattccaggttttccatgcgtaaataacacacgctttgcccggcatcctgtaaaagaaactgctccagcgcacgcaggttaggcagttgcgtcaacggatcggtcaatgcctgcgagtgccattgtcgattcaaccattcgctacgctgattaatccgcgccatgtacaacaaacaaatactaaaagaaatgagaactgaaaggataaatgccagcgaatattctgaacccacgccctgcagaaaattgcggttatagctaagcaggaatagcgcagtgagagcccaactaaaattcaacagcggatagctgattttccccacgccgatggtaaatccaatgaacagaactggcaccagatagccagcaatatactttgtctcgaaaggcgtacacagcaccgctaatagcgtcgccagagtggcaaaccagagaagcgtaaacaggcgtttttctttggcgagataaggagcgacatccctccgccagaaaatacgcatatagtgcgggctgactatcatccgcagcggataatagaaaaagagggtaaaaataagcgcggcagaaatcagactcaataaatcgacaatcgagaaaatagcggtgccggtgccaaagaaggtagagatggtcaccgggaaagccaggtagtgccccgccagatgcatactgatttttataccaaacggcgtcattaaccctaaccagaaaacgcgtagccagatgccttggttgggtattccgtagcgccagcgcgcgcccagctgccagcgtacgatagcgcaaaccagcagcacgggaaacgtttggcaaaatagcagcaccatcgcctgtggcagaggtaaatgaaaattccattcattagtcaacatcattccgcctaccatcggcgcgacgccacggcggccaaataaaaacagcacggaaaacatgacgcagagcggtagccaggccagaaagatatagctggaatcaattgtggcgcggggagaaatgagacgagatagcagaatagccggaacggtcaggcagaaggccagtaagaatatttttatattttttaatacgttacacttatccggcattgctttaatgctcacatcattatataaggcgcatgaataataagtatattcgcattatgaagcaatctaacaaaagctcatattgaccgcaaaagcagcggcaaacaaacgcacctgaagagcagatcagaggccataaattttgtgacaaaaagcaaaaacccccgcttttcagcgagggtttgaatgttggtggagctaagcgggatcgaaccgctgacctcttgcatgccatgcaagcgctctcccagctgagctatagccccatagtgcttttacgtatacgccaaatttatcgggagtaaatttggtggagctaagcgggatcgaaccgctgacctcttgcatgccatgcaagcgctctcccagctgagctatagccccactacgtaaagcttgtcgagttgacgggcggcatcatatgaattccctcggcatgtgtcaacggcaaaatgaacttgccgaattcaatcgctgaaaaagcattcaaataaaggacattgcggcacaactcgcattcagtagttaaacacgtcacggtttcgactaaaatggtgctataaaatgaaccactaattaaccccacgactattcagggaatcgttatgttcaaggaacggatgacgccagaagaactcgctaatctcaccggttacagccgacaaaccatcaataaatgggtacggaaagaaggctgggcaacatcgcccaaacctggcgtccagggcggtaaagcccgtctggttcatgtaaacgaacaggttcgtgaatatatccgcagcgctgaacgttcagttgaccatcacgcagacacattcacgcctgccagcaacgcatcgcttgaagcgctgctcatgacgctcgccaaagagatgacctcatccgagcagaaacagtttacctctctcctcgtgcgtgaagggattaccggtttgttacaacgcttagggatacgcgatagcaaataatatgaaaagattacgcagtaaaatgaccactgaagagctggctgaatgcctcggcgtggccagacaaaccgtcaatcgctggatcagagaacaacactggaaaaccgaaaaatttcccggcgtcaaaggcggacgcgcaagactcatccatattgatgccagcgtgcgggagtttattctcaatattccggcttttcgcaaactgcctgcgttttatcaggcggaagaggctttcgcagaatatgcgaacgcggcgcacagtcatgcttatcgacaaattattgatgccgttgaaaatatgtctgctcaggaacaggaaaaactggcgctgtttttatcgcgggaaggtattcgcggatttctgacgcgtttaggtatcaatgaggcggactaacaaataataaacggcaggcgtctgccctgccgtttattctgtttcagctggcgttactgctgactttcacgctcggcgataaagcccagcgctttgttgatgcgctcaatgctgcgggttttaccaatcgcatgtacggtgacatccagcgcaggcgactgcccggcaccggtcacagccacacgcagcggcatccccactttacccatccccacttccagctcatccgccgtggcctgaatcgcgtggtggacgttttctgctgaccagtccgtaatcgccgacagcttgtcgcgcaccacttccagcggctgacgcgccaccgggcggaggtgttttttcgccgcatcggcgtcaaactcgctgaagtcttcatagaagtagcggcagctctgcgccatctctttcagagttttgcagcgctcgcccagcaacttcaccagttcagcaagctgcgggccgttacgggtgtcgatattttcctgctcgatatgccactgcaaatgcgtcgccacatattccggcgccagcgtattgatatagtggtggttcagccacagcagtttatcggtgttgaacgcgctcgcagacttgctcaccgcaccgagggagaacagcttgatcatctcttcgcgagtgaagatttcctgatcgccgctggaccagcccagacgcaccagatagttcagcaacgcttccggcagataaccgtcatcgcgatactgcatcacgctcaccgcaccgtgacgtttagacagctttttaccgtcgtcgccgttaatcatcgacacatgcgcgtacatcggcaccggcgcgtttaacgctttcagaatgttaatctggcgcggagtattgttgatatggtcttcgccacgaatcacatgggtaatttccatatcccagtcgtccaccaccacacagaagttgtaggttggggaaccgtcggtacgacgaatgatcagatcgtccagctcctgattgctgaattcgatcgggccacggatctgatcatcaaaaataacggaaccgtcctgcgggttggcaaagcgcaccacgcatggctcatcgtcggcatgatgttcgtgactgtgacggcaacgcccgtcataacgcggcttctcgcctttcgccatctgatcttcacgcagttgctccagacgctctttagagcagtagcatttataggctgttcccgcctccagcatctcgtcaatcaccgcgttatagcgatcaaaacgtttggtctggaaatatgggccttcgtcccattccaggttcagccagttcataccatccatgatggcttcaatggcttccggcgtggaacgctcaagatcggtgtcttcaatacgcagcacgaactcaccgccgtggtgacgtgcgaaaagccaggaataaagagcagtacgcgcgccgccgacgtgcagataacctgtcgggctaggcgcgaagcgagttttgattttcatgaaatggccttacgtttataaagatgccgacaaccggcaaatcctggaaagatgaatagccttgtattctatcactgtggcttgattcctcaatgttgatccggtcagaacgctgcgctttgctatttccgtatagaaatcatgcagtgcggggtaattcacgatcgttttgtttaattttacgacgaacaaacaaaaactttagaaaatgcgttgactcattttcaactctccctataatgcgactccacacagcgggggtgattagctcagctgggagagcacctcccttacaaggagggggtcggcggttcgatcccgtcatcacccaccaactactttatgtagtctccgccgtgtagataagaaattgagaagtgggtgattagctcagctgggagagcacctcccttacaaggagggggtcggcggttcgatcccgtcatcacccaccactttctcgccagctaaatttcttattgtgaagtaccgaagtgggtgattagctcagctgggagagcacctcccttacaaggagggggtcggcggttcgatcccgtcatcacccaccacttcgggtcgttagctcagttggtagagcagttgacttttaatcaattggtcgcaggttcgaatcctgcacgacccaccaatgtaaaaaagcgccctaaaggcgcttttttgctatctgcgatatggaagattcgaacctgtcgcaggttcgggtcttgcctgatgcgctgcgcttatcaggcctacagacgacaccgcacacgtaggccggataagacgttagtcgccatccggcacagacattataccgtcaacgccgccaccagtttctccagtgctggcgttgcctgctgctggtcatacacaatatacaaatccgccggaatacgttcctctaacggacggaacaccacacccggccagctcatttgcgcatagccatcagccatcaacgtaatcccgatccccatactgatcatcgccaacaccgtttgcggctcaaccacttcccgaataatcattggcgaaaagcctgcctgttggcatacacgttgtaaaaatccccaatcagaatgtacggaaggcaacgtaacaaaatattcattgcgcaacgccgccaacggcacagaatctctggatgccagatcgtgatcttccggaactgcaaccatgaatgcagattcatgcaaacgtatgctggtaaaaccgactgctggttcgatagccatacgccagatccctgcatcaagttcccgacgctctaacaacgccatttgcataccgggagacttttcgcgaaaaagtacttcaacattgggatttgctttcaaaaagtgacgcatcgcaggacgcattcttccccacagcgccgtaccaaccacacccagttcaatgcgccccgcttcaccgcgaccaatctgctccactcgcgccagcgcctgatttgcactggctaacaagcgacgtgactcctccattaaaactttcccggcatgggttaatgcaacgctgcgggaatgacgaataaacagcaatgtacccagttgctgttcaagttctttgatatggatactcaagggaggttgtgacatatttaaccgggcagcagcccggccaaaatgcaattcttctgcaacagcgaggaaataacgtaatagctttagatcaatacgatgggctcgttccatcactatcgcactccaggaataagggataacgtctggaatttaccatattacctagtaaaaaatagatttaacgacaagatacccaatatacataaatacaatagataataccccgggtaaaacatttggtgcgggaataggtatacggcataaagtaaaaaatgcgccaataccaaatccaataccggaggagagaataatttctttcatgctgtgtccttgttcataaaaatggactggcgaacatcctctcgccagtcaaataaaattaatgtgctaatgatttggtcgacagtttttctggatggtgctgatatttaaagaacaatgcaaaaataacggccaatgccagagcgtaggcggcaaagaccagccagatagtttgccaatcttttacgccatcaatagaaaaataatccacggccataccgcttaaaagagacccaatccacgcccccacgccgttaaccatggtcataaatagcccctgcgcgctggcgcgaatacttgagtccacctcctgctctacaaatactgaccctgagatgttgaagaaatcaaatgcgcagccataaacaatcatcgacagcagcagtagcacaaagccaaacggggatggatcgccaaaggcaaagaagccgaaacgcagcgtccacgccagcatactcatcagcattaccgttttaataccaaagcgtttaaggaagaacggaatggtgaggataaagcccacttccgccatctgcgaaactgaaagcaagatagagggatacttcaccacaaagctgtcggcaaactcaggattacgggcaaaatcatgcaggaacggattaccgaagacattggtaatttgcagcaccgcccccaacatcatcgcaaacaaaaagaagattgccatgcgtggatttttaaacagaacaaaagcatccagtccgagcttactggcaagcgtggtgttcgccttcttctcggctaccggaattttcggtaacgtcagcgcatacagggccagcaataacgatgcgccagaagcgatgtataattgcgcactgctcagttccagccccatcaggctcaccgtccacatcgcaacaataaaacctattgtgccgaaaacgcgcacaggcggaaatgacgttaccggatcctgacctgctttcgccagacaggagtacgaaacgctattggataatgcaattgttggcatatacgccatcgcattcaccaacatcacccagaacatcgtctggggatcggtaacggtggtggcgtacaataacgcccccgcgcaaaccagatggcaaagcatgtaggctcgctcagcgcgcagccatttatcagcaatgatccccataatacccggcatgataatcgctgccagtccttttgagctgtagaccataccgacattcgcgccggtaaaatccagagtgttgatcatgtaagagcccagggtaaccagccagctcccccagataaaatattgcaagaacgacatgacttttaagcgggacgtaatacccattttttattccttgccgtgagataaagccccaatacggggccgtagtcattgtgtttaggccagcttacgtaaaaagccgcaaatcagatttataaagttctgccgggaaagttcagccgccgccagcgtttgcgcatgggagagttttacatcgcccagcccttccgccagattggtgatcgctgagacggcaacaactttgaggccacaatgacgtgcgctaatcacctcagggacaacggacattccgaccacatcgccgccaataatctgcatcatgcggatttctgccgccgtttcgaagttcggacccggataagaaacaaatacgccttcagtgagggtgaatccctcctctgccgcaacggactgaagcatggcgcgataatctgcgtcataagcattagccagcgagaagaagcgatcgccataacgatcatcgtttggccccaccatcggcgtaccgggcatcgtattaatgtgatcgctaagcgcaaccaggctacccggccccacttccggacgcagagatcctgccgcattggtgcagaacaacacttcacagcccagtaatttcaacgtgcgaatggcatcggtcatcaccgccattccacgcccttcataaaaatgtccacggcctttcatacaggccaccggaacccccgccagatggccgagcaccagttcaccagcatggccgtgtacggtgctgacgggaaatcccggcaatttctcgtaagaaatggctaccgcatcttcgatttggtccgccagagcacccaacccggagcctaaaataaacgcaactcgcggggtaaatgccggtttatgtgcatgaacaatatcaacacaatactcaggattatgagaaaaaagagcgtgaggcataagtttccttgttctatcggatttaatttgactcctttttataacgaccatcgccccttgctgaccaatacacttttcacgtgtcatcaatagccatttaatatcgataaatttagatcgcttctgtattaatacagagggaaaacagtattggtttttgcttgcaattcatattaacaatatgccgctttcatatttataaattgcctctttttaattaacccattaataattatcggcatagggaaatatgctatgaaaaaaattcttactctgacgctttcttctttactcattattcccgcactcacccatgcggaatttaaaggcgggttcgccgatatcggcctccattacctcgactggacatcagacaccacggaaaaaaccagtaaaaaatcccataaagatgattttgggtacctggaactggaaggcggagcgaattttagctggggagaaatgtacgggttcttcgactgggaaaatttttacaatggccgccacgctaaaccaggcagcgaacagcgttacacctttaaaaataccaaccgtatttatctgggcgatacaggattaaacctctatctccatgcctacgggacgtacggttcacctcatcgcgctaatttccatgatgacatgtttctctatggtttaggctataacttcacaggtaacggttactggtttaaacccttctttgccaaacgttataccgatcagacctactacacaggcgataatggttatgtattaggttgggtggccggctatagcttctcgttgggtagtgagaaattcagcgtaacgaactggaatgagtatgagtttgaccgcgatgcgtcctacgctgcgggcaatggcgggaaagatggcattaatggcgcagtagcgctgtggtggaatgcgactcctcacctgaccgcaggagtacaatatcgttacgctgataataagttaggagaatccttcctgcaggatggcattatttactccatcaaatacctgttttaacacacagccctgtcaaaaatggcagggcaagaccgcacctcacacacggacagatagatatttatagctgatacagcggatctttcgccctcgcggcggttaattcgctggcctgggtacgcaccacgtcccacaacgcctgcgccgccgtggagagcgatcggttttttcgccgcgccagcatgagctgcctttcaactacgggcgtcagccgtttaacctgtaagtggctgccctgcgggagcggtaacgccagcgcgggcagcacgctgatgccgattcccgcttccaccattggaaacagcgtggccgggtgaccaatctcctgcacgatatccgcctcaatagcaaaatgggccagcgccgcatcaatcagcggtcgactgccggaagcataatcctgtaagaccagcgaggcctgtttaagatcctgccagctcacccattcctgatgcgccagcggatgatcctggcgacacaacagtaaaaaaggctctgataagatggcttcacactgtaaatccaccgctgcgccgggatcgataacgatgccaaaatccacttcaccctggcggatgctctccagcacccactgctgcggacgatcgtgcaatacaaaatcaatagcgggataaagtgaattactttgggcaatgcattgcggaataagatgcgcagaaatggtttggctcgcggcaacgcgcacggtgccggttaattgtgtccctactctgcctgcatcgcgcagtatgctgttcagttcatcaagcacccgctccagacgcgtcgccagttgttgccccgcctcggtcagcaccacctcacgcgtagtgcgatccaacagtctgacgccggtttgccgctccagctcttttacgctatgactgaccgcagactggctcagtccaatcctgtcccctgcccgactgaaacttttggcctgggcgacggtaataaaaatacgcagttgacgcagtgaatagttcatcgactagattcatatatagatgcaataaatcaattttatttctcaaagcgaaaaacgcaaaatagctgcaccgactttcaggagtttttatgaaactttttcgtatccttgaccctttcacgctgacacttatcaccgtggtactactggcctcttttttcccggcggaaggtggctttgtgcctgtcgttgaaggcattacgacagcggctatcgctctgctgttttttatgcatggcgcgaagctttcgcgtgaagcgatcatcgctggcggcagccactggcggttgcatctgtgggtcatgtgcagcacttttgtgctctttcctgtcctcggcgtactgtttgcctggtgggcgcctgtcaatgtcgaccctatgctctacagcggctttctgtatctgtgtattttgcccgccaccgtgcagtctgcgattgcgtttacttcactcgcgggcggtaacgtcgcggccgcggtgtgctcagcgtctgcgtccagcctgctgggcattttcctgtcgccgctgctggtcggtctggtaatgaatattcatggcgcgcagggcagtctggaagaggtgggcaaaattatgctgcaactgctgctgccttttgtgctgggacacctgtctcgcccgtggatcggcaattgggtcgcgcgcaacaaaaagtggatcgcgaaaacggatcagacctctattctgttggtggtctactcggcgttcagcgaagcggtggtcaacggcatctggcacaaagtcggctggggatcgctgctgtttatcgtcgtggtcagcctcatactgctggcgatcgtcatagccattaacgtctttgtcgcccgtaaatgcggcttcaataaagccgacgaaatcactattgtcttctgcggttcgaaaaaaagcctggccaacgggatcccgatggccaatattctgtttccgacgtcagtgctgggtatgatggtattaccgctgatgatcttccaccagatccaactgatggtctgcgcagggctggcgcggcgctacaaacgccagaccgagaagttacaggcgcagcaggaaagccgcgccgcgaaagcttaaagcgggcgtttcaggggctgtaccagttgcgtcagcccctcggttttaatcagcagcgtgatttgcatcaactcccccagtttacccgccggaaattgatctttacgggcaaaccacagcaaatactcttccggaaggtcgatcaatcgacgtccctgatatttgccaaagggcatcacggtgttggcgatttcaaccagctgctctttttccatctcaggcacccagtaagcggatcatttccgcttcatcaatcacggtaatacccagttcctgcgctttggccagtttggagcccgccgcttcaccggcaatcaccagatcggttttcttcgatacgctgcctgccactttcgcgcccagcgccactaaacgcgctttagcgtcatcgcgagacatctggctcaggctaccggttagtaccacggttttaccggcaaacgggctatcgatctcttgcacattaatgactaccggcgcgggccagtgaaccccttccgccagtagctgcccaatcacgtcacgattactctcttcggcaaaaaagttaaagacgtgcgtagcgaccacaatccccacgtcaggtactttctgcaactcgtcaatggtggcggcctgcagcgcctccagcgtaccgaaataagccgccagccccgccgccgtcgcttcacccacttcacggatgcccagcgcatagagaaaacgcgcaaaggtcgtcgttttggatttttccagcgcgttaacaacattttgcgcggactttggccccattcggtccaggccggtcagtttacccgccgtcagacggaacagatccgctggcgtatggacatactccctttccaccagttggtcgatgatcttatcgcccatcccgtctacatccatcgcccggcgcgacacaaaatgtttcagcgactctttacgctgcgcgccgcaaatcagcccgccggtacaacgggtaacggcttcgccttcaacgcgctctacgtccgatccgcacaccggacagtgcgttggaaacacaatcggacgcgtctcttcagggcgttcggacagaaccacgttgaccacctgagggatcacatcgcctgcccgacggataaccaccttatcgccaatgcgcaagccaagtcgctcaatttcatcggcattatgcaacgtggcattgctgaccagcacaccagccacctgaaccggttccagacgcgccaccggcgtaatcgccccggtacgcccgacctgaaactcaacgtcgcgcacaaaagtcatctgctcctgagcaggaaatttaaacgccaccgcccagcgcggcgcgcgggccacaaagcccagcagttcctgcaaagccagcgagttgaccttaatcaccacgccgtcgatatcaaaaccgagcgtagggcgatctttttcgacgttgtgataaaaatccagtaccgcctggggagaatcgcacagcgtcacgcgatcgctgaccggtaacccccacgctttaaattgcagcaaacgtcccagatgcgtatccggcaactcgccgccttccagaataccgacgccgtagcagaaaaatgttagcggtcgcttcgccgtaatacgcggatcgagctgacgcagcgaacccgccgccgcgttacgcgggttagcaaacactttgccgccagtgcggcgcgcgtcttcattgatcttttcaaacccggcctgcggtaaaaatacctctccgcgaacttcaagacgcgccggaatgttatcgccgtgcagctttaacggaatggcgcgaatcgtgcgcacgtttgaagtgatatcttcaccggtggtgccgtcgccacgcgtcgcagcgctcaccagcacgccgttttcatacagaatgctgaccgccagaccatccagctttagctcgcagcaccagatgacattttccgtgctttttagacgatcctgcactcgcttgttaaacgccaggaagctttcttcatcaaatacgttatcgagcgacagcatcggtacttcatggcgaatctggttgaatgccgtcagcggcgccgcgccaacgcgctgcgtgggcgaatccggcgtgataaggtccggacgttgcgcctccagctctcgcagttcccgcatcaggcggtcatattcggcgtcgggaatctctggcgcatccatcacatgatacagatattcatgatggcgaagcgtggttcgcagttctgtcagttgttgttcgattggttccatatcacaccatcaatgataaaaaacccccgacaggcgggggttacgttaaaaatgtcacacctgcgttaacctcaggcgttagcgtccatcacctcgcggatgcggtcctgatattcgcgcagtttctgcggcgtcatcatccgacgctggtcatccagcacgacgccaccgacctcatcagcgatatgctgcgcggattgcagcatcagcttgaaattctgcagcgcatcgccgtaagacggtacctgcataaagatagtgacgccaggcgtagtgaagtccgtcatttcaggatcgaacgttcccggattgaccatattcgcgagactgaacaaggccgggccgctgccgtccgggctcaaatgacgatggaaaatattcatatcgccaaatttaaagcctgactgctgaatactgttcagtaacacttcaccattaagctcgctgccatgatgggccgcgacgttcataatgatgaccgcctctttacgctgcggtttttccacaaccggcgcttcttccactaccggttccgcctcaaccacaggttccgcaggctggaaggtttgcgctgatggcggcggcgcgggctgcgcaacaggctgcggcgcttgcgacggcggtgcaggctgctgttgcggcggctgtaccggcggcgcagatggctgaacctgctgaggctgcggcgcaggttgaaccggttgctgaaccggctgttgcatcggcgcttgcggctgcggcggcgccgctggacgcggttgcgcagacgcataaggcggctggtactggtgttgcggcgactgacgaggggcatcatgctcctgcgactggccgggggcatgatttacgcggtgaacacgaacttcacccacgccttcgtcttcttcgtcatcgtcgtcatacgagtcgtcgtcgcgtttcgatttcatgcgttttagtggacgatcgcggaacatagaagatcgttctttacggctggtccagaaaccatgtaccagtaaagcgattatggcgatcgcgccaacaatgattaatatcagacgcaaatcctgcatcattatattctctgttgttctaacaccttgccaccacggcaaacatttactcactaagagtatttgccgattacgtcaagtgcaagtgtactgttggctttcgcagcataaagatgaaggaaaatgtgctttttgctgttttttcgaacatttccgaactatccaccgtctgataaccgggtaagatatcccacgtttacccagggctttaagaaaaaggagtatgtcctgaatatggtttcatcatccacaaccgtaccacgtagcggcgtctattatttctcgcaaggatggaagttagtcaccctaccgggaatccgccgctttgttattttacctttgctggtcaacattgtgctgatgggcggcgcattttggtggctgtttacccagcttgacgcctggataccttcgttgatgagtcatgtgccggactggctgcaatggctgagctatctgctgtggccgattgcggttatctctgttctgctggtctttggctattttttctctaccctcgccaactggatcgccgcgccgtttaacggccttttagccgaacagcttgaggcgcggttaaccggcgccacgccgccagatacaggcatactcggcatcatgaaagatgtaccgcgcattatgaaacgtgaatggcaaaagctggcgtggtatctgccgcgcgctattgtgctgctgattctctattttattcctggcattggccaaaccatcgcgccggtgctgtggtttttgttcagcgcctggatgctggcgattcagtattgcgactatccgtttgataaccacaaagtgccgtttaaaacgatgcgcgccgcgttgcgcacgcagaaggtggcgaatatgcaatttggcgcgctcaccagcctctttacgatgattccggtgcttaacctgttcattatgcctgtcgccgtctgtggcgcgacggcaatgtgggttgattgctggcgtgctaagcacgcgttatggaaataacgtaaaaatgtataaataagagatggcttatgctgtctcttattccatactgataaccattatttcccatcagcatatagatatgcgaaatccttacttccccatatctggctggaaggtatgctgggaaggtatcccaatttcatacagttaaggacaggccatgagtaagatttatgaagataactcgctgactatcggtcatacgccgctggttcgactgaaccgtatcggtaatggacgcattctggcaaaggtggagtcgcgcaacccgagcttcagcgtcaagtgccgtatcggcgccaacatgatttgggatgccgaaaagcgtggcgtactgaaacctggcgtggaactggtggagccgaccagcggcaacaccggtattgcgctggcgtatgtcgccgccgcgcgcggttacaaactcaccctgaccatgccggaaaccatgagcattgaacgccgcaagctactcaaagcattaggcgcgaatctggtgctgaccgaaggggcgaaagggatgaaaggcgctattcagaaagccgaagaaattgtcgccagcgatccgcaaaaatatctcctgctccagcagttcagcaaccctgccaacccggaaatccatgaaaaaaccaccggcccggaaatctgggaagacaccgatggtcaggtggatgtgtttatctccggcgtcggcactggcggtacgttaaccggcgtcacgcgttatatcaaagggacgaagggtaaaaccgatcttatcaccgttgcggtagaacccactgactccccggttattgcccaggcgctggctggtgaagagatcaaaccaggcccgcataaaattcagggtatcggcgcaggcttcatcccgggcaacctggatctgaaactgattgataaagtggttggcatcaccaatgaagaagctatttctaccgcgcgccgtctgatggaagaggaaggtattctggcaggaatttcttccggcgccgcggttgctgcagcgcttaagctgcaggaagatgaaagctttaccaataagaatattgtggttatcctaccttcatcaggtgagcgttatctgagcaccgcgttgttcgccgatctctttactgagaaagaactgcaacagtgatgccagcatgttaaaaacgcgtaaaaaagcacctttttgggtgcttttttgtggcctgcttcaaactttcacctcacctggcattgattcaccctgccggaactggtatttaaccagactaattattttgatgcgcgaaattaatcgttacaggaaaagcgttagctgaatcgattttatgatttggttcaaatcttcctttcgcggcataatgtttaatgacgagcgaaacgtcagcggccataagttgccagcaacggattgcgtagaacaccttttgtgtcgcgtcccgtttacgccggcgctaacaatacaggctaaagttgagccgccaggctagactttagttccacaacactaaacctataagttggggaaatacaatgttccagcaagaagttaccattaccgctccgaacggtctgcacacccgccctgctgctcagtttgttaaagaagcaaaaggcttcacttctgagattactgtgacttccaacggcaaaagcgccagcgcgaaaagcctgtttaaactgcagactctgggcctgactcaaggcaccgtcgtcaccatctccgcagaaggtgaagatgagcagaaagcggttgaacatctggtcaaactgatggcggaactcgagtaagtttttttccgggttcttttaaaaatcagtcacaagtaaggtagggttatgatttcaggcattttagcatccccgggtatcgctttcggcaaagcactgctgctgaaagaagacgaaatcgtcattgaccggaaaaaaatttctgccgacaaggttgatcaggaagttgaacgttttctgagcggtcgtgccaaggcatctgcgcaactggaagcgatcaagacaaaagctggtgaaacgttcggtgaagaaaaagaagccatctttgaagggcatattatgctgctcgaagatgaggagctggagcaggaaatcatagccctgattaaagataagcacatgacggctgacgcagccgcacatgaagttatcgaaggtcaggccactgccctggaagaactggatgacgaatacctgaaagagcgtgcggctgacgtacgtgatattggtaagcgcctgctgcgcaacatcctgggtctggccattatcgatctgagcgcgattcaggaagaagttatcctggttgccgctgacctgacgccgtcagaaaccgcgcagctgaacctgcagaaagtgctgggcttcatcaccgacgcgggcggacgcacgtctcatacctccatcatggcgcgttctctggaactgccggcgatcgtaggtaccggtagcgtcaccgctcaggtgaaaaacggcgattatctgattctggatgccgtaaacaaccaggtttacgtcaacccgaccaacgatgttattgagcaactgcgcgccgtccaggagcaggttgcgaccgagaaagcggaactggctaaactgaaagatctgccggcaatcacgctggatggacatcaggttgaagtttgcgccaacatcggtaccgttcgtgacgttgaaggcgctgagcgcaacggcgcggaaggcgttggtctgtatcgtactgaattcctgttcatggatcgcgacgcgctgccgacggaagaagagcagtttgccgcctataaagcggtcgctgaagcgtgcggctcgcaggcggttatcgtccgtaccatggacattggcggcgacaaagagctgccgtacatgaacttcccgaaagaagagaacccgttcctgggctggcgcgccgtgcgtatcgccatggatcgcaaagagatcctgcgtgaccaggttcgcgcgattctgcgtgcctccgctttcggtaaattgcgcattatgttcccgatgatcatctctgttgaagaagttcgcgcgctgcgcaaagagattgaaatctacaaacaggaactgcgtgacgaaggtaaagcatttgacgaaagcattgagattggcgtgatggtggaaacaccggctgcggcgacaattgcgcgtcatttagccaaagaagttgatttctttagtatcggcaccaatgatttaacgcagtacaccctggcagttgaccgtggtaatgatatgatttcacacctttaccagccaatgtcaccgtccgtactgaacttgatcaagcaagttattgatgcttctcatgcagaaggtaaatggactggcatgtgtggtgagcttgcaggcgacgaacgtgctacacttctgttgctggggatgggtctggacgaattctctatgagcgccatttctatcccgcgcattaagaagattatccgtaacacgaacttcgaagatgcgaaggtgttagcagagcaggctcttgctcaaccgacaacggacgagttaatgacgctggttaacaagttcattgaagaaaaaacaatctgctaatccacgagatgcggcccaatttactgcttaggagaagatcatgggtttgttcgataaactaaaatctctggtttctgatgataagaaagacaccggaactattgagattgttgccccgctctctggcgagatcgtcaacatcgaagacgtgccggatgtagtttttgctgaaaaaatcgttggtgatggcatcgctatcaaaccaaccggtaacaaaatggtcgcccctgttgacggtaccatcggcaaaatctttgaaaccaaccatgcgttctctatcgaatccgatagcggcattgagctgttcgttcacttcggtatcgacaccgttgagctgaaaggcgaaggcttcaagcgtattgctgaagaaggtcagcgcgtgaaagttggcgatccggtcatcgagttcgatctgccgttgctggaagaaaaagccaagtctaccctgactccggttgttatctccaacatggatgaaatcaaagaactgatcaaactgtccggtagcgtgaccgtgggtgaaactccggttatccgcattaagaagtaattcttgccgcagtgaagaatggcgcctttgggcgccatttttttgcctgtacttgcgccgccatccggcgatggtgcagtgcactgcctgatggcgctacgcttatcaggcctacaaggttgcgaacatttcagcgccaatccacgggttacaactgcgaggtcaccgggcgaaagcacttctcgcgcatcaggatcttcatcccatccgggccactctccagcatcctgcgttcggaatcggacacttgcagctcgcactgatagccgccagtgatgccaaacatcgctcgcgccacgcagatatcttccagcgcgtccagcccgctcgtttcaaaatgccccacgatacgtccctgctggcgaaccaccagccgataactcttcatcgcgcctcccctgccggcggcagaattaactcatcacagccacactgctgtgtccaggtcatcacctccagcacgcgctgcgccgcatcttttgccgcggtcgtcagttttttcccctgcacaataccgctgaccagctcggcgcagaagagatctcccgtcccttttaactccgtcgccacccgcggatgggcaaagacctccacgacctgcgcagtaacgaccgcaaccgttatggtctccagagactcgcccggcgcgctggtgataaccacccatttcaacgtatcggaaagcagcgattgcgccgccgccaccgcctcttccagcgtgcggcacggtttaccactcagcatctccagctcaaatacgttcggcgttagcccctgcgcctgcggcaacaaatgcgtgcgataagcctgcggaatttccgcctgcacatacattccactgtcggtatcgccaatgaccggatcaacaagaatacacacctccggatgcgaagcccggatcgccattagccacttcgaaagcaagacaatttggtctgcgctgcccatgtaaccggtggtaatcgcttttaattcacgtagcgcatcgcgctcattcaacgccgtaaggtagcctgcaaaccactcggcgggaataatgccgccataaaaggttttatagtgcggcgtattgctgaatagcaccgtcgggaccgccgtcacgcgtagtccctgcgctttaatggccggaacagcgatactgttgcctacgctgccgtacacgacctgtgactggacggcgacgatatcggtctgtaatgcccgatggttgtcgtcgaagagcactgactgaatatcactctcttgtcccataaaattttcctctcgctggacagcaggctaccgcctcattatcattgtcatatgctaaaattcattttgtcataggtcaataatgatcgacggaaaaaccgctaacgaaatttttgacagtatccgtcaacacattatcgccggcacgttacgggcggaggattcgctcccgccggtacgggagctggcaagcgaattaaaggtgaaccgcaataccgtcgcagcggcgtataaacggctgataacggcgggactggcgcaaagtttaggccgcaatgggacggtgattaaaggcagtccgtctcccgtagcgctggaaggcggcgatccacatacgcctctgcacgacctttccggcggcaatcccgatccgcagcgtctgcctgaccttagccgttattttgcccgtctcagccgcacgccgcatctctacggcgatgcgcccgtttcccctgaactacacgcctgggcggcgcgctggctacgggatgccacccccgtcgcaggcgaaattgatatcaccagcggagctatcgacgccattgaaagactgctttgcgcgcatctgctgccgggcgacagcgtcgcggtggaagatccctgttttttaagcagtatcaatatgctgcgctatgccggttttagcgccagcccggtcagtgtggatagcgaaggaatgcagcctgaaaagctggaacgggcgctaaatcagggcgcgcgggcagtgatcttaacgccgcgcgcgcacaaccctaccggctgtagcctgagcgctcgccgtgccgctgcgctgcaaaatatgctggcgcgttaccctcaggtagtggtcattatcgacgatcacttcgccctgctttcttcgtcgccctggcagccggttattgcgcagacaacgcaacactgggcggtgatacgctccgtttccaaaaccctcggccccgatttacgtcttgctattgtcgccagcgacagcgcgacctcggcaaaacttcggctgcggctaaatgccggtagtcagtgggtcagccatctgttacaggatctggtctacgcctgcctgaccgaccctgagtatcagcacaggctgacgcaaacgcggctgttttacgccgcccggcaacaaaaactggcccgcgccctacagcaatatggcatcgccatttctcccggcgacggcgtgaatgcctggctcccactggacacccatagccaggctaccgcgtttacgttggcaaaatccggctggctggtacgtgagggagaagcctttggcgtaagcgcgccgtctcacggtctacgtatcacgctgtcgacattaaatgacagcgagatcaacacgctggcggctgatatccatcaggcgctaaatcgctaacaggagaaaataacgtgcgagttcattttgttgtccatgagtcgtttgaatccgctggcgcttatctgaaatgggctgaagatcgcggttataccatttcatggtcgcgcgtctatgccggagaagcgctaccgcccaatgccgatgagttcgatatgctcgtggtatttggcggtccgcagtcgccgcgcaccacccgcgaagagtgcccgtactttgactctcgcgccgaacagcacttaattaatcaggcagttacggcccggcgaatggttatcggcatttgtcttggttcgcagctcattggcgaggcgctgggcgccgctgtgtgccaaagtccggaaaaagagattggtcactaccctattacgctcactgaagccggtctgcggcatccgcttatcgcccactttggctccccgttaaccgtcggccactggcacaacgatatgccaggactcaccgatcaggcgaccgtgctggccgaaagcgaaggctgtccacgtcagatagtgcagtacggtaattttgtctacggcttccagtgtcatatggaatttaccgtcgaggcggttgaaggattaatccaacattcgcagcaggagctggccgacgcgcaagggaagcgttttatccgctcggtcgccgagatgcgcgcatggaattaccagcaaatgaatgaaaagctgtggcgttttctggatgaactcacgctggcgcactcacagaaataaccacaccaggagtgcaacttattacccggctaacggtctgaggtgcagtgattattgcatgaaaaaggattttaccatgaagaaaattgtttgcgccgtcgttgcgctcctgctgaccctacccgcctgggcgaagctgaacgcccatgaagaagcgcgcattaacgccatgcttaatgcgctggcgcagaaaaaggatctgacattcgttcgtaacggtgatgcgcataactgcgaggaagccgtatcgcacctgcgcttaaaactgggtaacacgcgcaatcgtatcgacaccgccgaacagtttatcgataaagtcgcgtcgtcgtcgtccatcaccggaaaaccctatatcgttaaaattcccggtaaaagcgatgaaaacgcgcagccttatttacatgcgcttattgcggaaacggataagaatgttgagtaagaaaaaatcataatgccaggcgtgttactgtggttttttaaaggcgttatcgcgcttctgttagcgtttgctgtagggttaatcgtttactattatctggaaattcgtcccatagcccagaccgcattacagagcgcctctttctggttgtccgaatcgccgcagacgcgttttttgcgccgcgctgcggccaaaatacatcccaaatcttatactgccagattgctctatacccaagctggcgtggatgggcatttcaggatcgcgatctgggtgttctggttggacagcctgtaccgcgacgacgagctgtatgccatgatgctggcgcaagcgtattatggccgggattcgcagggtaacgcggtttacggtacgaaaaatgcggcgttaacgttatttcacgtaccagtgacagagatggcctgccagcaacaagtacaactgatttatatgtttaaagcgccgtcactttaccggcctggttcagccaggctggtagaaagcagcaagcattacatgacgctttgccaggaacaaatacaacaataagaacaacagacgagcttttattataaaaggcggcggtaatgcgctggcgcacatagaaaatcggcaggatattcccgcttgtcaaaggcgccgttgcctgtgtttatcccaatcagctgaactcattagtttaaatccctgccccctggctgaaatgctcttcaccaaacacgccggtcgaaaggtaacggtcgccgcgatcgcagatgatcgccaccactatcgcgccgggcgtggctcgtgcgacgcgtaacgcgcccgctaccgcgccgccggaactcacgccgcagaaaatgccttcacgaacggccagttcacgcatggtgttttcggcatcattctgatgaatatccagcacctcatctaccagcgaggcgttaaaaatgcccggcatatattccgcaggccagcgtcgaatgcccggaatactgctgccctcttccggctgtaggccaacgatggtgaccggtttttcctgctcgcgcagaaaacgcgacacgccggtaatggtgccggtcgtgcccatgctggagacaaaatgggtgatgcgacctgacgtttgccgccagatttccgggccggtggtcgtgtagtgggcgtagggattatcaggattattaaactgatcgagcagtttgccctcgcctcgttcagacatagcgagcgctaaatcgcgcgccccttccattccctgctctttagtgaccagaatcagttccgcgccataggcccgcattgccgcccgacgctcctgactcatgttgtctggcatcaacagcttcatgcgataacctttcagcgcggcgatcatcgccagcgcaatgccagtgttgccgctggtcgcttcaatcaggacatcgcccggtttaatttccccgcgcttttccgcctcgacaatcatcgatagcgccgcgcgatctttcaccgatcctgccggattattgccttccagcttgacccagatttcactgccgttatccggccccagacgttgtaatttgaccagcggcgtattgccgatggtttgttctaatgtattcacgttttcagctcgtaaaaaagcccggtatgcgtagcgccaccgggcgataactatacaaattaacctatcaggccgattgcgccagagcaagttcctcttcacgcgtttcaatacgctggtcgccgttatacagacgcgctttttgcagtccaacaaacaaacgctcgccgcgaaccggaacatcctcacccgccatcaccaccgtcagcggatcgtgataccaccccagcggctgtaccactaactgtgtatagtgacctttcgggctggcctcaatgacctgtactggtagaggagaatccaggctggtgcggcggctaatatccacctcccacggacgcaggaacagatcgaccggcccctggtacgcgggcgtataacccagcggccagcgatgcgcgccaacgtgaaactgcccgccgcggacggtgcctgtcaggcggttcacctcgcccataaactccagtacgaagcgggttgccggttcacgccacacccgatccggcgcatcagcctgttcgatattgccctgactcatcaccaccacccgatccgccacttccgtcgcctcttcctgatcgtgggtgacaaagacgctggtgaatttcagttcttcatgtagctggcgcaaccagcgacgtaactctttacgtacctgggcatccagcgcgccaaagggttcatccagcagtagaatttgcggttccacggcaagcgcgcgcgccagcgccacgcgctgtttttgtccgccggaaagctgggcggggaagcgatccgcgaggtgcgccagttgcaccatctccagcaattgcgtcactttcgttttaatcgccgccgcagttgggcggtcgcgtcgcggcagcaccgtcaggccaaaagcgatgttgtcaaacaccgtcatatggcgaaacagcgcatagtgctgaaacacaaaaccgactttacgctcacgcgcgtgcaggcggctaacgtccgtaccgtggaaacgaatatgaccgctggactgatgctccagcccggcaataatgcgcagcagcgtcgttttgccggaacctgacggccccaacaaggcaaccatctggccggaaggaatatccagcgagatatcattcagtacctgagtgcgaccaaaggatttcttaattctggcgatctcaatgctcatgattttcctcctgttgcgcgcgtttttcctgattctccagacgccattgcaacatgctcttcaaaaacagggtaataatcgccattagcgtcaacaatgcggcggcggtaaaggagccgacggtgttgtagtcctgctccagtaattcaatctgtaacggtagcgataacgtttcgccgcgaatcgagccggacaccaccgacaccgcgccaaactcgccaatcgcgcgggcgttggttaacaccacgccgtagagtagcgcccagcgaatattcggcaacgtcacgcggcgaaacatttgccagccggatgcgcccagtaaaatcgccgcctcatcttcctgactgccctggctgagcatcactggcaccagttcgcgcaccacaaacgggcaggtgacaaaaatagtgaccagtaccatccccggccaggagaacatcatttgcaaattatgctcatccagccagccgcccaacgggccgttggaaccataaaacagcagataaaccagaccggccaccaccggcgagacggcaaagggaatatccagcagggtcagcagtagctgacgtccggggaagttaaagcgcgtcaccagccacgccagcagaatgccgaacaccagattcaccggcactgcgatcaaggcaatcaacaccgtcagccagatggcgtgcagcatgtccggatcggccagattttgcagtaccggcattaaccctttgctgaacgcctgcacgaagatgtaaatcatcggcaccagcaggataaacgccgaaaccagcatcccgacgccaatcagaaaccattttccccagttaatgcgggggacgtcgtatcgcttcaattgagtcacttccgccattaatgacctaccacacgtcgaccaaagcgactttgcaaggtattgatagagaacagcagcagcaaggatgccgcaaggatcaccgaggcaatggcgctagcggccgggtaatcaaactcctgcaagcgcacaaaaatcatcagcgaggtcacttctgttttccaggcgatatttccggcgataaaaatcaccgcgccaaactcgcccaggctacgggtaaaagagagcgccacgccggcaatcagcgcaggcgacagctcaggcagcacgactttgcgaaaactttgcagccgggtggcccccagcgtttgcgccgcttcttcatattccggccccagctcttccagtaccggctggacggtgcgcaccacaaatggaatactggtaaaggccatcgccaccgcaataccgagccaggtataggtcactttgatatcaaactgcgcaagaaactgaccgtagaaaccgttcactgagaacagcgaggccagcgttaaccccgctaccgctgtcggcagcgcaaacggcagatccatcagcgcatccagcaacgtgcgccctggaaaacggtagcgggttaaaatccacgccatcagcaggccaaacacgccattaaaaatcgacgctacaaatgccgccagtagcgtcactttataggcagccaccacctgagggttggtcacgacatcccagtattgcgcccagctcatctgtgagagctgcatcaccagcgcgctcaacggcaacagtaggatcaggcagacaaacagcaaactggtgccgaggcttaacgtaaagccgggcagcacgcgtcgggaagaaacggcaagcattacttacgccccgccgccaacagtttgtccagctcgccgccgctggcaaagtgcgttttcatcacttccggccaggaaccaaacttttcttccacgcggaacagttcggtctgcgggaatttatctgcttgcttgcccatgatttccgggttattcacgcggtagtagtaatgggtgatgatggtctgcgcctgcgggctatacagccagttcaggtaagctttggcggctttttctgtgccgttggcctgcacgtttttatccacccaggcaaccgggaattcagcaagaatgttcgttttcgggatcaccacttcaaatccctgggcttcatattgtttgcggatattgttcacttccgactcaaaactaatcagcacatcgcccagaccacgctcggcaaaggtagtcgtagcgccgcgaccgccggtatcaaacacttcgacgtttttcaggaactgggtcataaactgttcggttttggctttatcgccgccgtccgcgttatccgccgcgccccatgccgccagatacgtgtaacgggcgttgccggaggttttcgggttagggaaaatcagcttcacgtcggaacgtacaagatcgctccagtcgtgaatatttttcgggtttcccttgcgcaccaggaaacccatcgtggaatagaatggcgaactgttgttcggcagacggctttgccagtcggcagggatcagtttgcctttatcatgaagaatctgtacgtcggtcacctgattgtaggtgacgacgtctgccttcagtccctgcaaaatcgccagcgcctgttttgatgacccggcatgagactgcttaatcgtcagcttatcgccgccgttatccttcgcccattgttgctcaaacggcgggttaagggcggcaaacagctcgcgggagacatcgtatgagctgttcagcagctccgttgcctgcgcctgccctgccagtaacagcattgctgccagcgtcaggggtctctttttcagtaagttaacggccattgcgcacccttataaatttaatgactttcttatggtcatcatatttataaccagcgctaaaggagtaacggttttatataccgtttgatgatttgaaagttgaaaagggaataagagaatccctccccacgcggcgtgaggaggagaccggcatcaatcagacgcctacgcttacgctttcaggcagggtactgccgccatcaatgacgttttgcgttccggtaagatagctggactcatcggaagccagaaatgccgccagttcccctacttccagcggatcggcaaggcggcgtagcggaatggcttttgccatttccgttaataccgattccggatcgtcagggttagactgacgggcaatgctttccgccatcggcgttcttacataaccggggcaaatggcattcacacgaataccggactgcgcatactctaccgccagcgatttggttaaaccgacaatggcggcttttgacagcgcataggccgtttcacccgggtccgccaccatatctcccgtgacggaagacatcatcacaatgcggccatctttacgtttaatcatctccggcaggacggctttggtgacgttccagacacctttaatattaatatcaatgtggaaatcgcgatcttcttcactcatatcgaggaagttgcccagacggcacacgccagcgttattcaccaaaatatcaattctaccttcagtctctttggcgcgcgcaaccgccgcctgcaccgaagcaaaatctctgacgtcagccttaacggcagtgcagcgatgcccgcgcccgcccagctcatccgccagtttttcaatctcatcggagatatccagcaagattaagttcgcgccgtggcgtgcgaatacgcgagcgatcccttcgccaatgccctgcgatgcgcccgtaatcaatgctgtcttgcccgtgagtttacccattttcaatgtctccttttgaatatggagtcttacactccattaacactgaaaatacagtaataacaaataagtgctgaggaatagctcactaattcaggtaaatattaggtaaaaaaatccccgcggaggcggggatgggcatttttatgctgttctgcctgatggcgctgcgcttatcaggcctaccaatcgtaggtcgaataaagcgtttgcgctgccatccgacagggttttaccttatagcgctaacaggcgatccagcgacggcgcaaaatagtagccgccagtcaccggtttggtgaagcgcagcatcgcgtcgcgtttaccgtcggtatcgccgaacatactcagaagctgctgttcgatattgtgcagacgtgcgcagtaagcgcagaaatagagaccatgagtaccgctggcggtgccgtatggcaggctctggcgcacaatcttcagccctttgccatcttctttgagatcgacgcggctcaggtgagatgttgccggacgcgcatcgccgtcaatctcttcattggcttctttggtacgcccgatcatcatctcctgatcgtgaatactcatccggttaagttgcttgagattgtgttcccaacgctgcacgaacacataactgccgccggcatccacgccatctttgatcaccgccacttcacggcgcgtctcttcgcccgccgggttctctgtcccgtcgacaaagccgctcagatcgcgttcttccacccaacggaaaccgtgaacttcttctttcacgtcgatacagtcgccgaaggcttccatcgccgcctgggcaacagaaaaattcacatcgtggcgcagggaaaggatatggatcagcacgtcatactgcgtggccggtgccagccctttaccataaggaataaaatctttcagttcttccgccccgacgccgccactcagggcacgccaggtattgttgccaaacgccacaacggccccaagatgggcgtccggaaatttgacttcgaaggtcgccagtttatcggcaaatgttctgctggccgcgcgcagggcgtccaggtcgcctttcacattggcttcaatccaaattgccgcacggcaatgttccggcaaaatgccactttgaacctgagacatgattcctcctgaaaatgagaatgccacgcagtcgtggcattaatggaggctattttaccttgtttttaagcgaagcggtttgttcaggcgcaaattaacgacgccagataattttgcgcacgtcccagttttttaagacgtcatcaggaggcattaagccttccggtccgctccactcgccggagaaaacatagctaatatgctgacttccctcggctttacattcgacgctggtatggctatcgctggaaaccggctcgcagtgaccaaacgctttgctgtaaaggtcgctaaacggcgtaccgattttgccccccgcggcggttgggatatcgctgtccagcacatcaatacggctcacggttccctgctcgccgttgatcaccatcgcgacactgtcgcccttcatcgcttcgaaaaagcgcaccacgttgccgttatcggttttcataccgctacgcaggcgataatcgccatctaatgcctctgcaatagccggctcttccagcggcgtggcggcggtcagcgctcccacgccttgctcagtgacttctgtcgaggaaccaaaccagttccatggatttgcggcagaccagttgaccgaggagagcgtcgagcagccggtcaccgccagcggcagtgcgagtaaagtcaaacgcagcgatttcatctcacttcctttcttttattaattaacgttggttggagtgcgggttcgccaaaaagtgccgttattctttctcaagggaaaaacaggcacgcaaacgttgattggttaacagccagatcagcgcgacgatgtccgccagcagcagcgccagcccgacgccgttgaccgggtcgccacccagccacatcaccggcagccagcacaacgacaccagttgagcaaggatcaggagtccgcgcagccagcgccacacaccaggaaccgcgtcacgccgcccgctgagtaaaaatgccactaccgccggaacgccgggcaacagccccagccaaaaattgtcatggtcgggataaaaaaagtttaacaaagtattaccctgtccacgggatgaaccggcaatgacaaagagtacccaggcgcgcgcctgaagtagcagtacgcaccagaacagaaacggcaggcgtaaacgtccgtgtacatcataatcggctggatgaaactcagtactcttcatcttcaatcaggcgtttacccaaacttagggcgtcagaatgctcataccccagacgttcatacatgcccagcacaacgtcgttatcatcgcgcaccataatttggattttcggacacccgcgagcgatgagttttttttccagccggttaagcaacgcattcgcaatgccgcgcccgcggaactccgggtgaacgcccaggtaatacgccgagccgcgatgcccgtcataaccgcccattaccgtaccgacgacttcgccgctaacttccgcaacgaggaacaagctgacatcgtgattcaccttgcgttcaatatccatttcaggatcgttccatggacgcagcaggtcgcaacgctcccagagggtgatcacctcttcgaaatcttcctggcgaaaaacgcgtatttccatggtattcgttgccttttcgggtggaaaaaccaagattatggcgcaaacatctgattcagccaatatctgacgcgatgtagcggaaaaaatggcataatggcgatgtgtcacgtattgaaatgaaaagtaaaacaattctcatcaccaaccgtcgtaacggattacgcgatacgatataacatcttgaacttaattttcacaactcaggccgtatgagcacttttaaactcctaaaaactctcacatcgcgccgccaggtactcaaaacaggtctggcggccctgacgctgtcaggtatgtcgcacgcagtagccaaagaagaaacgctaaaaaccagtaatggtcacagcaaacccaaaaccaaaaaaaccggcagtaaacggttggtgatgctcgaccccggacacggcggcatcgataccggcgcgattggccgcaacggttctcaggaaaaacacgtcgtactggcaattgccaaaaacgtgcgcgctattttgcgaaatcacggaatcgatgcgcgtttaacccggacaggggatacttttattccgctgtacgatcgggtggaaatcgcccataagcacggcgcggatctgtttatgtccattcatgccgatggttttaccaatccgaaagcagcgggcgcttccgtttttgcgctttccaaccgcggggccagtagcgccatggcgaagtatctctccgagcgtgaaaaccgcgcggacgaagtggcgggtaaaaaagccactgaccgggatcatctattacaacaagttttgtttgatctggtgcaaaccgatacgattaaaaacagtctgacgctgggttcgcatattctcaagaaaatcaaacctatacataaattacacagccgcactaccgaacaagcggctttcgtggtgctaaaatcaccgtcaattccgtcggtgctggtcgaaacctcgtttattaccaatccggaagaagaacgcctgctgggcacgacggcgtttcgccagaaaatcgctacggcgatcgccaacggcatcatcagttattttcactggtttgataatcagaaagcacacacgaagaaacggtaatcatgaaacccgatgcacatcacgtaaaacagtttctgctacgcctgcaggatgatatttgccaaacgttatccgctgtggatggcgcaaactttgtcgaagatagctggcgacgcgaagcgggcggcggcggacgcagccgggtattacgcaacggcgggattttcgaacaggcgggcgttaatttctctcacgttcacggcgatgcaatgcccgcgtccgccaccgcgcatcggccagaactcgccgggcgtagcttcgaagcgatgggcgtatcgctggtggtgcatccgcacaatccgtatattcccaccagccatgctaacgtgcgcttttttattgccgaaaaaccgggcgccgatccggtatggtggtttggcggcgggttcgatttaacgccctactacggctttgaagaggatgccgttcactggcaccgcaccgcccgcgacctgtgccagccgtttggtgacgatgtgtatccgcgttataaaaagtggtgcgacgactacttttttctcaaacaccgcaacgagcagcgcggcgttggcggcctgttttttgacgatttgaatacgccggatttcgaccactgcttcgactttatgcaggcggtcggcaacggttacacccgggcgtatttaccgattgtcgaacgacgcaaagcgatggtctggggcgagcgggagcgtaattttcaactttatcgccgcggtcgctacgtggagttcaatctggtgtgggacagaggcaccctgtttggtctgcaaaccggcgggcgcactgaatctatcctgatgtcgatgccgccgctggtgcgctgggagtacgactggcagccagaagcgggtagcccggaagcggcgctgagcgagtttattcaggtacgcgactggatttaacttatttataaagtaaaacaatgcaaacaaatacacggaaagtagtaaccagtgacgccaaatggcatccccatctgggtataagttttattggctgcctgcttgccattacactagaaatatattttgaagaaagaatattcatccctcatagcggaggggtgagcttcggtctgatcgtgcttctggttatcaatatggtgaccatccctgtggtcatggccctgatagcattactctgctttattattcatattccgcgtaaaagcgttaactgtatcttgctatgcctactgtcatgtattttgacgatagccggtttgtttatcgcctatccggttggccgttgaataaaagcaggctcgtagaaataaacgagttcattgtagataaagaattcggataaccgcccgctgccgttatcattagtaaaacagtacagtaagcactcgtagaatttgcagtggagcactaccgcatggacgagcgtattccttgtaaaaacccgcaatgctcacacttcatcctgccagcaacggctgcccgcacggagggctattgtatgccctgcgtccaggcgcgctatcggcaagtgcaggaagaatatatccggaaaaacagaaaaacgatcgacgcgttcagtggcattaccaaccctgttgaaatgcttaaactcgttcatgaaccccgggaacacgatccgttaatcgagtggattccctgccccattccgaccgatgagctttacaaaaagctctccgatgatgaaagccgcgacatggtcgattatgcagaagaattatttgattccggatggcaggaggaagctcaggaaattgcgctgtgcctggcggcatttacccaggccaatctggataatttcctgcgccaggtaataaatgaagaagaactggagctctcttcacccctaccttttcaccgtgcgccgcctgacgtacgcgacgcgcttttgcagaaggtggaaaccgatgacgaaaaccgtgacggcattctttgtgccctggcctggattggcgatgaggttgtcgttgagcattttaaccgctggcgccaggaaccacctgcgtggagtgcttcacttcatatcctccctcatcgctatgctcaccaggcgggatgggagctcactgaaaatggccgcaggcgcgatctttactttacgcaatgtacccatctggtaaaacaggcacctgaacagccggccgtttttcgcgccgttgcagaatatggtgaaaactgcccacactgttccctgccgctaatcaatctgtttgaggttgcgccgagcgccgtcggcctaagcacgcagggttggcccggtcaaattcgtattctgacctgtcagtgttgtacggcatataacaccgttttcgccaccgtcgatccacaaggccagccgcgatggtacgaaaaaaatgcgctctcgacgctggcggtggagaattccgctgactggataacgctaccgcttgatgttctgcaccccggggaatcccgtttgccgctattcgctgctgaaatatttttacccaccaccttctcacagctcggcggccatcccgcatgggttcaggatacagactatcctacgtgcccaacgtgcgcgcaaacgatgatgtttcttgcgcagctaagctatgaagatatcgaggaagaggaatatgcggaaggaatgctttacgggtttatctgcccctcctgccaaacaacggcaacgtcttatcagcaaacataaacgctcatcctcatgatctgatgacaaaactgttttgcacgttgtgcgcgcgcttccccggaggcggcgctggcgcgccttgtccgggctaccaaccacagacagcagcgaatccgtaggcccggtaaggcgccagctgccaccgggcaattcccgacacgcgcacgttatcagcaaccggagagcctccccatcaatatcaagcccattgccgcatccgttgatgcagcgtcaacgacggtttttcggcaaataattgctgataatcggtggcaaattgccccagatgccagaatccccactgcatcgcggcatctttgaccgtggcgctctgcgaccacgggctaatcagttcccggcgtactgcgtttaagcgaatacgtttcagccacgcattggggccaatgcccaaaatggcgtgaaacgcattttgcagcgtgcgacggcttacgtgtagctggttacataagtcgagcaccgtcagcggctccgacatattttccagcacatattcccgcgcccgcgacagtagcctacgatatccctgatggctgatgctttcggcgctatgaatcggcttcgcctcttccagcatcgtgcccatcgccagcaataaattatcactcaagaccttacgcaccgcaggttgatgcagagtttcaggactctcgctgaaggtggccagcgcctgctgcacaaagccccacagcgctgctttatgctgctcttttacctccagcgctagctggttacgcagcatatgcagcaccctttccgggttatgcaaaaacgtggcctgacgggaaataacatcttccgagataacgacgcccagaatggtgtaatcatccggcgtgctcagttcaaactcggtgcctcccggtcgggtggcaatctcggcgctgccgagcccctgcgcgccgataaatccctgttcgccgcgcgtcgccggaataccaaaccagaaagagtttggccaaaccagacacgactgacgcagcgccaggccggtgtattcacggaacacctgaatctcatcaagcaggatttccgtgaactcgccatgaaatttacccgggtgtaactgatcgtagatctgctgccaggcggtgatagtcagagcatgttcatagacatccgtcgtccgtcgctgatgaacattgtccacctcgactctgggcgtaagtttaacgtcttcgggtaacgcttcatgataaagatggtgcaaattcgctgtacgggtctttttcatgatcttctatgccggacgcccgccaggacgcccggccctccgacagattaatttttgatgcgatagcgactactgcgtttacgcaacgctccgtcagaaaagagttgttccagcacgtttctggcctgctccagcggccagccaaaatgcgcggcaacctctcccgccgtcattccctggcgtactgatgccagcagcgccaataacgcctcagcgaactcaggcgttgcgggtacctggggtgctttctcagtcggcgttgtcgcacgcgcaaacccgccaatcagccactgggtgtcctcttccggacgaccaatttctttgcgactaatcacacggcctgtgcgctgcgcggcagcgcttccggcatccagcgccgcacgacacgccgccagatcgccctccaccaccagcgtgagcctgccagggtcgagcacttgatgactgagcaaacgcacgttggccgctttcagcatggcatccgccgcatcgacggcggcgaccattccgtccacttccagtaatcccagggcattgatcattggcagcctccgttacgcacgctggacagggttacgggcgatatccagcacggcgtcggtaaaggcgttgcaggcggctttacacgcggcctggcttcccgttaagaacgcggccgaatagttggtttccgacggcggcggcacgtaagtcaccagctgaacgtcagcggatttcatcgccgcgtcaatgccgaatgtcgcttccagcggcggcgccaccaggtaggccattggatcgcccagcgcgatacctgcggtagacgagaggtacgagccggtacgcgaaaccacatgcgccaggaatgcggtattttccgcatcgttcgcccactggaacgccgcgccgttttcaatgctggcgaccattgcatccagaccggcgcgcacttccgccgggttcggtccgcccagcataatcaacacctcaccagcggtaggcgacggcccgtgagccgccccggcatagagggagcggccatagaccacttccaccatcgcctgttttgtcgcttcgtcagcggcaatataggtcacatcatcagaatctgccgtgatgagtccgagactacgtatatgtggcggtaatttaagttcccgcgcaaagccgtcattcacggaggcaatcacgcgcatggcagtcactgaaggtcgaattaaatctaatgcaggcatgatgtctccttaacgggtcatgttgatgccggacgctttctgctccagcatccgtttggccaaatccacaatcacggcggcggcttctactggcggcgtcccccctgatgaatgtttgaaatacaggttctgtcggcctcgacggtggtcgccacgcgcggggaatagaccgcgtagcaggaaaggctttccgactgccccagccccggacgttcgcctaccagcaggatgacgaccttcgcgccgagaatttcgccaatctgatcttcaatcttcacacggccatagcgcacaaagaacggcgtgccgacgttcagcccggcctgcttcagaccggcaagcaacggcggcaggatctcttcatagttggcggtgatcgcatccgtagagaggccatcggagaccactacctgcacatccgggttcatcacgcactgtgacttcagcgcgtcaatggcttccgggctcaggcgacgccccatatccgggcgcgtcaggtacaggtttttgtcgctgatctccgaacgcacttccagcagcccttgcgcttttacccactcttccggcacttctttgagcacggtatctttcgaacgggagtgatccgccaggaagcgcaacagcgcctgggtgcgcggacgcggcccggcacgccccgtacagacgcgtgccgcagtactgcgacgcagttcggtcagcacgtccgcacgatgtgggttctcgacgccaatccaggcttttgcctccgcggaacctaaatccagcgcgcagctttcggtcaccgtcggcgcggcgcactgcggctttgcgccttcctgcgttgacggcgcggcgggctgcggtacgtcctgtcccattgacgccatcacgctacgtacaatttcttcaatctgtttttgatccatggtgttatccccgcgtcatcagaagaacagtgacggatcgcccgcccgtttggtcagacgaccgtttgccataatgcccatcgtttccagccagcgttcaaactccggcgacggccgtaaattcagcaactgacggacggtggcggtatcgtggaaagcggtggtctggtagttgagcatgatgtcgtcgccgagcggcatccccatgatgtagttacagccggcagtggcgagcagaatcatcaggttttcgttaaggttctggtcggcgtcggcatggttggtatagcagcagtcgcagcccatcgagatgccgctcagcttgcccataaagtgatcttcgagaccggcgcggataatctgcctgtcgttgtagagatactccggcccgataaagcccaccacggtgttcaccaggaacggatcgtagtggcgcgccagcccgtagttacgcgcttccatcgtcacctggtcggcaccaaagttcgcgcctgcggagagcgcagacccttgcccggtttcaaagtacaggcagttttccccggcgatgcggttgaactccgcccccacagcccgcgcttcgtcgagcatggccagctcgacgccgaactcttttaagcccttctcgctgccgcaaatgctctggaaaatcagtccgcccggcgcgccgcgacgaatcgcttcgatctgggtggtgacgtgcgccagcacgcagccctgggtcggaatattgaatttatcgataacgccgtaaacggtgtcgagcacgcgggtcaggttctccacgtcatcggtcaccgggttaacgccgatcaccgcatcgcctgcgccgaaagaaagcccttcgtagatttgcgcggcgatactctgtacatcgtcacgggtatcgttcggctgcaaacggcagctaaaggtgcccggaataccgatggtggtattggcttttttgatcaccggcattttcttgccgccgtagatcaggtcagcgttggagcagattttcgctactgccgccaccacttcggaggtcaggcctttgcgggtaaacgcgatgtcgtccacggaggtttcatcgctcagcacgtattcacgcagttcgctgatgctccagtttttaatccggttataggccgtttcgttgacgtcgtcctgaatcaggcgcgtcacgcagtcctcttcataggcaatcaccggattgttgcggatatccgccaccgtcatttccgacagtacctgttttgccgctacgcgctcctgcgaacttgccgcggcaaccccggccagcacatcccccgaacgcagttcgttggctttagccagtacctcttttacatccttaaactgataaacattgccgaacaatgtggtctttagtttcataagtcgttccctcaggaaggaaatgcgagtgatttcaccgtcaccggcacaaccgatccgccaaaaagaggcgtaccaatgtcgatatagtctcccgcccgcacgaccacctcatcgatgaccgccagcggaagttgcggtaactgtgggcgcaataacatgcccagcgctttaccaaaatcctgctcggccaccaccagcaggggatgtggattgggataacgcgcgacaaaagccgtcagcgcgttgatgaccgtgagtaatgcggcgtaacgcaccggaagcgtggcgggaagcgccagcacgtaagcgtcggtttgcgggtcgagatcaagctggagaagcgcctgccgccaggcgttcaccagatcggcgtcatcctgcgggatcgccaccggcaggttgcgcagcggcagttggacgtcttccagccagatagtactgccggaaagcgagagcgtatgggcccccgcgccaatcaccgtggcgcgcacggtttgcgccggaaactgcacgttcatctcgcgcagacgcgggtgctcatgcagcgcggtcgccagcagcggcccgatatcagaaaagcagaacggatcggcaggttggttgcggtagcattcacctaccccaccggaaagggtgatcacctccggcgtaatatcggcgggcagcagcccggtttgcatcagcgattgcgccagcggcgagagcgcgccagtgataacctcgacgatgagatccgccatccgccgcgccacctgtcccaactgtgcggcagctaaggcgcgagcatcagtacccgaaccgaacacctcatcgataatcatctgccccggctgatgggcataaaccacgcgcccctgagcatcggtttccagcaggcgaccaccgacgttaaggcaggcggtgccgctgacttttcccgcgtcaaacagcgcgtagttagacgtgccgccgccgatatcaatattcagcacccggcacatccgctgctcagacaagctttgcgctccggcgccgtgaccggcaatgaccgattccagatgcggcccggcgctggcgaccacaaagtcgcccagcgactgcgagagcgccatgaccgccggacgggcgttgcgggttttggcgctttcgccggtgataatgatagcccctgagtccaccgattcaggcgcgatgcctgcggcctgatactgggccagaatcagcgctttaagttctacctctttcagaccgccctgcttatccacgggcgtaaagaagaccgggctttgccagctaatgtcgcgtttgatgaattcgtagcgcggcacctgcgacaccgccgcacggttaaccaactccaggcgcgagaagatcacctgcgtggtggtggtgccgatatcgataccgacgctcagtagctggcgagtgttcacgattgcgcctccgcttcggttttcacctgggcggcgtcatctttcggcaccagcatcatcgccacgccaatcgccgtcacgccgccgatcagcttgccgacaatcatcgggaagatcatggcgttcatgttggcagcggcgaagcctaaatggtcgcccagcgcgaacgccgcagagacggcaaatgcgcagttaatcactttgccgcgggtatccatctgcttcatcatgccgaacatggggatattgttcgccagggtcgccaccatgcctgccgccgcaatattattgacgttcagcagtttaccgacattcatcaacggtttttcaaaccagcgggtcagtaacagcaccatcggatacgcgccaagcagcacgcaggagatagagccgatcacttcaatggcgcgcatcacttcgccgggtttgtcgcctggcgccataaagatcgggtcgagtcccggaatcaactcccaacccaacaggaatttaaccaccgcagctgccagaccgatggtgatcagcgctaccagaaatttggcgaagatctggaaaccgttgatcattttttccgggatgaacttcagccccagcgctaccagcaccgcgacgatcaataccgggatcatgttcatcaggatcagcgcgaaggtaaactccactggctgaccattgatctgcacacctgagtacatggcgatcagtccccccgcaatgcagccaatgggaatggtgacgatacccgccagtacgccaagcgccaggtagcggcggtcagacggttcgataatgccgagcgccaccggaatggagaacacaatggtcggccccatcatcgacccaagtattaaccctgagtatagccacgccgcgacatcaccgccggccagctctttggcgaggaagaatccgcccatatcacaggccagcagcgtacccgcgaacatggatgggttcgcgcccagcatttcgtataccgggataataaccggccccagtacatgcgccagcaccggcgccagcgcggtcataccgaccatcgccagccccagcgcgcccatcgccataaagccctcttcaaactggccgccagacccctcgatactcttgccgaatttaccgaggaagcgcgccgacccgccgaactgcgacaggattctgtccacggcggcaatcagcataaagaacatcatgatgtacatgatgatttcgttaattcccatagcccctactccctgtcatttttgatttgtaaaccggataagacgtttacgtcgcctccggcattaacgccgtgttattgccggatggcggtgcgagcaccttatccggcctacaggcattacccggcagccgcgtacaggtcgataatctgtgcctgtgtggcggtgcgtgggttactgcgcagacaaatatcctccagcgcggcttgcgcccacgcgctgtagtgttcgggtttggcgccagcgtcagccagccgtttgctctgtcccacttcggcaatcagctcgcacaccgccgcaatcgcatcgcgatcgtccgatttcttattggttaacgcccgacctatttgactgaagcgctcgcggcaaaccatccggttaaagcccatgactgttggcagcagcatggcgttggcctggccgtgcggaatatgcagcgccgccccaggctggtgcgccatcgcatgacacagccccagaccggcgctggaaaaggccattcccgccatacaggaggccagcaacatattttcacgcgccgccagatcgtggccgtaacccacggctttcggcagcgatttgccaatcatcgctatcgcgccaatcgccaggctgtcggtaaacggcgtggcgttgagcgcgctgtaggcctcaatcgcatgcgtcaacgcatcgataccggtcatcgccgtcacgtttggcggaacgccttcggtcacggcagcatcaagaatcgccacgtccggcattagtgacgcgtgcgccagcacctgcttgcgcccgctgaccgcgtcgataatcaccgttacgttggtggtttcagaaccggttccggcggtggtcggcaccgcaatcagcggcagacgcgggcgtaatgtactgtgctcggtcatggcgctcagcgtctggtcagggttagtcaccagcagggcgaccgctttcgccgcgtccagcaccgaaccgccgccaaaggccactacgccgtcgcacgccgcctcacgcagttgcgccaccgccgcgcagacatcggtgatgcacggctcgccaggcggacacggccagaccgtcatcgccacgcccttcatcgccaggctgcgtgccagcggcgcggtcattcccgcctgatgcaggaagctgtcgaccatcacaaacagatggcttacgcctcgcgcttgcgcttcctgtccacaggcgccgagcgccccaagtccgcacagcgtgaccggcggtacgctgaacgttttcacccgttgcagattcagggtgtcgaatgcctgaaacagcgccgtctgtagttcagcttgcatagagtccctccgctttcgctctcccgctgttggctatcgccagcggggtcataaacaggctgtgctgcggcaaatgcacctgtaactccgggaaacgctggcgaaataacgcctccacgcccggctgcatacaggagccgcccgccagccataaatcagcaattccttgcccttcaatgtggcgagcaacgatttccgccatcttttcgtacaccggcttcactaccggccaaatctcctgcgcattgctgcgcttgtactgttccgcctcttccaggggaatacggcggttgcccgccagcgtcagggagatatggtgcccgccagtggcttcatcggcggagtaagtcaccttgccctgtttgacgatggcaatgccggtagtgccgccgccaatatccaccacgcctgcattatcaagcgccagcagatccgctaccgccgtcggttcatccagtacatggctgacttctaacccggcagactccagcacgttgatcgaaatacgcgggtcggtgcctggcggaaacgaggtcgccgcgtgggtaaagcggcagccgagctgctgttcaagggtgtcgagatggcggcgcacgagggtgacggcgccgaagaaatcccagacgatgccgtcacgcacaacgtcggcccagtcaaggcataccgccaccggctgggcgttgccgtcgaccaccatcgacaccacgtcgcaggtgcccaaatcgacgcccagccacagcggtgtatcgctggcggcgggcgtctggttacacagggccgccgctttttgcagtcttggggtgagccagagttgttcgtcgtgcgccatgagtcatcccttatacaatgcgaaacgcatccaccagcacgcatcgacgcagccgcacaaaggtacgcgcgctggtcaccccttcgccggttggcgtagtgatagtcatggtggtccagccttctccgcccaatccaagcccggcaatgcacggcccgtttttgacgaaaatgctggtgtcgatggcgttcgccatctggttcatgttgtcgatattgcgcgagtgcatcgccgccgtatggtggcaaccgccttcaagctgaaccgccagggcgatggcttcttcgacgttggcgacccgcaccaccggcagtaccggcatcatcatttcagtaacggcaaacggatggttggcgggcgtttccacaaacagcaggcgcgtttgatccgggacgttcaggccgatggctgcggcgatcttgcccgcgtcacgaccgacccagtcacggctgacggtgcctttgccgcgttcatcgatattcttcagcagcaccggctggagctgttcggcctgagcggcggtcagtttcaccgcgtgctgaccttccatcagacgcatcagctcgtcggcgacgctatccaccacaatcagcactttttcgtcggcacagatgatgttgttatcaaacgacgcgcctttgacgatggattgtgcagcgcgcggcaggtcggcggtctcatccaccaccaccgggggattgccggcaccggcggcgatcaggcgtttattagtatgtttacgcgccgcgtccaccaccgcttcgccgccagtcaccaccagcaggccaataccgggatatttgaacaaccgctgggcggtttcgatatccgggttcgccacggtgaccagcaaattttccggaccaccggcggcgaccaccgcctgattgaggagagtgattgcccgctgagagacctttttcgccgccggatgcggggcaaacacgacgctgttgcctgcggcaatcaggctgatggcgttattaatcaccgtcgccgccggattggtggacggcgtgaccgaggccaccacgccccacggtgcattttcaatcagcgtcaggccgttatcgccggtcagcacctgcggagataaacactcgacgcccggcgtgccgcgcgcctgcgccacgtttttggcaaatttatcgtcaacgcgtcccatgccggtttcgctgacggcaagttccgctaattctcgggcgtgtttttcgcccgcttcgcgaatggcatgaatggcaagctggcgcatcgccacgctcttcagcccctgctgggcccgttttgctgccgccactgcgtcatccagggaggcaaaaacgcccatctcatgaacagtactggccggctggctgctgtctttcattttcagcagtaccgctttcaccacctgttcaatatcctgttgattcatgatgttcaatcctatttatggaaaaccactttcccgccagccaccacttcatcgacgatgccaatgacgcacagatcgaccggtgataattcgctgcgatgcgcctggcgtgcggaactgccgctgaccagcagtacccactctccggttcccgccccgatactgtcgatagcgacggcacactgcccgtcggggttgccctgggcatcgatcatttccaccatcagcaatttgtcatgcgccagtccctgatggcggacggtacatacgatttgtcctgtgacgactgccagtttcatatccgcctccatggattgcccgttgggtcgtaggccttgaatctgcgcaccatcaggcaatggcgcgcattcatgccggatggcgacgctgcgcgtcttatccggcctaccatcaaatgttgctgtcgcctttgaagctgatcgggaacacttcttccagatcgccgtgcgggcgtggaatcacgtgtacggagaccaactcgccaatgcgctgcgccgcagcggcgccagcatcggttgcggctttgcacgccgccacatcgccacgcaccatggcagtacacaggccaccgccaatctgcttcacgccgaccagcttcacgcgcgcggcttttaccatcgcatcggaggcctcaatcagcgcaaccaggccccgggtttcaatcattcctaatgcttccatcgtgttttcctctcattaaaggggtccagaacgggaccgttcattcaaccagtgtgtgtaagctgcgttcgcggctcacgtcagcctggcgcggcacggctgccaccaacgccagttcgataatttcctgcacgctacagcctcgggagaggtcgtgaagcggcgcggcaagcccctgaattagcggcccaacagcgcgatagcctcccagacgctgagtgattttgtagccaatattgcccgcctccagcgacgggaaaatcatcacgttggcgcggccttgcagcgggctgtcaggcgctttttgcgcggcgacctccggcacgaaagcggcgtcaaactgcaattcaccgtccacaagcagttgcggcgcacgttcgcgaacgagctctgtcgcctgctgcacgttggcaacattggggtgacgggcgctgccgttgcttgaaaatgacagcatcgccacgcgcggctcttcgccggtaatggcccgccaggtgtcggcgctggcgagagcgatatccgccagctgcgccgccgtcggctgcggcactacgctgcaatcggcgaaccctaatgccggaccggcatactgcggcagcatcaggaaaatagacgacaatgttttgcacccgggttgcaggccaatcacccgcagccctgcgcgcagcacgttcgccgttgacgacaggttgcctgcgatacacacatcagcctcaccggcgctcaccatggcggcagcgaacatcagcggatcgctaagcttttccactgcgtccggcggcgttttttctccggcacgggcaagccagcgttgcgcaaaacgctggcgcatactcaggttgctgtgtgggtcgatgacctgaatgccatccatcgccatacgatgactcagggcaaactgacgcagcgcaaacggactggcgaccagaacggggcgagccagaccgtactgttgcaggtaatgcgccgctttcagcacgcgttcgtccagcgcatcaggaaagacgactctggcgggggcgcgtaccgccagttcgcgggcgcgttcaatgatcatggcttctctcccaaccgttgttgaatttgggcgaccgtcagcggatgtttcgccacgctcaaaatcatcatcacgtaaaccgtactggagagacggttcagcgcctgtaaaatgtccgggcgcaagacctcaaaactacgggtaataaacacttgtgcggcgagggtttctgtttcgcggactttggttcgcagcagattaagcagcgccgcatcgcgaccgtggctggcctccggcaccaggtgatcgtggtcgaggtagcgcagcggctggtgggaaaggcgatgcagctcatcctcgttcagtccgacgatagactgcgccgccagcggttcatctatagcgtcggcgcgcataatgttgcccagccgcgagcggatatcgaaaagccacggctgccagggttccgccagttcgatttgtagccacacggtcagcgcgatggcgctgtcgagcgcggcgcgaaagccgaggcgcgggtcgcttttggcgaccattttgtccgccgtcagatgggtcagcgtatcgggctttttcaccaccggctggcggcacagttcacagcaggcctgtgggtgcgtatcgctactggttaagccatgtaccggctgcggctgctgttcgtcatcatcgacaaacagccggccttgcggatccagaaacttaatgcgcagacggcgactttccagcagttcccgggccgagggcgtcagtcgtgcgtcagcgggcagatggatctccgatccttcgctgagcgtatgattcgctctgagccacgtttcggtgatgaaatcgttcatacggattgccagtttgcaggccaggcgacgtacagaaagcgcacggacgttggcgtgccaaattcaatgctggagcctttagggatgaacatcacatctccggctttggcaatcatggtttcgccttcatggcgtacgtgcagttcgccttccagcaccatgtcgatttcgtcgtagttcagcgtccacgggaaaaaggcgttgtcccactgcataaacccggcggccatgctgctaccatcctgctctgtaaccagatcggttaagccgacgcagtgcggttcggcgccgtcgaagcggccaaatttcacgctgctgccgtcaatgactttcacgccgcctttacccgtgacggaggtaaagctcggctgcatcgtccccagttccagcgactgcttttccttcagcactttttccatcaactgcgccaccaggctttcagtaaactgcccttccgggagctgcgcgatgatggcttcccgaatgcgctggctttcgcttttacacgcctgcgccgatgtggatgccggaacggactcgtcgcattcggtaatcgtgaagcccagtagttccgccacttcgcgagcctccggggtaataatgctggcgcgcagcactaccgacatcgcctgttcgccgcgggcgtgggccgcacgaatatcgttagctgtgataagttttttcacctgcctcttcctcctgttcactgagagccgccagataatccaccaactgccgcacgctttgcgggtcgtggccgttgagctcgaaaatcggctcccggaatccaatctcgcaaagcaactgccgcgtagcggcgacgtcggcatccggcatgtccgttttgctgataacggcgatatgtcgtttacgggttccaacatccaataacccggcaggtaagcgactttctttatcgtttgccgcgtggacataaatcagcgtgtccacatcctgcaacgtggtaattaaggcgtgataccaacggggatggctaaaatattcacccggcgtatcgatatcgccatgatcattaaattccacggcctgcgtttttctggcgagggaataatttccccgtaacgcgttaaaaagcgttgtttttccggcaccgaccgcgccgacaaaagcaatacgtttcattaccgccaccaattaactttttgttaactcacacagggtaaagtttaataatcgccccagcccgctgaccgtctgtaatagcgcttcttctactgcgccgacggtgccataaatcaccagcgcgccgctaaatctatcgagaaaaccgatgtgtacatccgcagccttcatcgctaaatcgccagcgatcatcgccgtttcccccggcgttaaagtcataatgccaatcgcgccagcatcgggaacgccgatctttttcgccagttcttcaccagggtgcgcaatgagatgcgccagcgtgacctgtttgcccggcacaaattcctgaataatgcgttctttattcattgctcaccgtctccactgaaactgccgtcatcgtggcaattttttgtcggagtaaataacaaaattcggcaaggtgatgtaaaaggtgaggtagatcactaagagaaagaaaataaaagtgacttctgtcgaaggtgttaacgataaatatcgtggtgcatcacattttcaggcgtcattctgaatttaagcctgttccgcaataaatactcaccgactattctttgtattactaccattgataaaaataatgcgtatcactcgatttgtgcatagtacagattcagtgaaataagtaggggtaagcgcaacaggttccagaatatccccacccgagcctttcatgccatggcgaagcccagcggcgcataaataaatatcctccggcatagccggaggtttttcagatgcgcctataaggctctcttaccagccgcgccctaacaggcgcatacgatctgacatttgcatcaaacttcgttacttacggcccgtaaacgggctgcccggatacgggatcgataattgctcacccattttatcctcttcaagctggtgctttatgtagtcctgtatcttcgccgtgttcttacccaccgtatcgacatagtaccctctgcaccagaactccctgttcctgtatttgaattttagatccccaaactgctcgtaaagcatcagactacttttacccttcagatatcccatgaaactcgacacactcatcttcggcgggatctccagaagcatgtgaatatgatctgcacaacattctgcttccagaattcgtacgtttttccattcacacaattttcttaatatgctgcctactgccctacgcttctctccatagaacgcttgtcttcggtatttgggcgcgaaaactatgtgatatttacagttccatcgggtgtgcgctaagctcttttcgtcccccattgggacccccttttgatttcttgttgaacttttgcagttgccagaccgcaagatgttttaacaaatcaaaaggggttttaataactggcttaaagctgaaagctttccggaacccccagcctagctgggggttttccatagacaaaaaagcgcaggagaacctgcgccagaagagagagtaatgcgttattaaagcggcgtggtttgcgcttcaactaccgctaacgccaccatattcacgatacggcgtacagaggcgatcggcgttaatacatgtaccggtttagacacgcccatcaggaccgggccgaccgtgacgccttcggaactggagacgcggagtaagttgtaactaatgcgagcggcttccatattcggcatcaccagaatattggcggctcccttcagcgggctatccggcatccggtcattacgaatactttccaccaacgccgcatcaccgtgcatctcaccgtcaatcatcagatcgggcgctcgttcgcgtacccgctcaagggtttcgcgcattttgctggcggacagcgaatttgaggaaccaaagttagagtgcgacaacagcgcgactttcggctcaataccaaagcggcgaacggtttccgccgccattacggcgatctccgccaactgttccggcgtgggatcttcgttaacataagtatcggcgataaaagtgttgccgcttggcagcagtaaggcgttcatcgcccctgccgtatgcacgccgtcacggtagccaaagacggctttcacgacgctgaaatgctcatggtagtcgccgatggtgccgcagatcatcgcatccgcttccccacgctgcaccatgatcgcgccaatggccgtatggttgccgatcatcgcacgctgcgcctgttcctgagttatcccgcgacgcttcatgatctggtaatactcgctccagtactctttgaagcgcggatcggattcattattcacgatctcgaaatcaacgcccgctttgatctgtagccccagtttctggatacgcatttcgatcacgctcggacgtccgatcaggatgggcttcgccagtcccagggttatcaactcctgggttgcgtgcagcacgcgcgcctcttccccttccggcagcactacgcgcttcggatctttgcgtgcctgcgagaagatcggcttcatgaacaggttggttttgtagacaaactcggtcagtttatcgatataggcatcaaagtcagcaatcgggcgcgtcgccacgccggaatccattgccgctttcgcgaccgccggagcgattttgacaattagacgcgggtcaaacggtttcggaataatgtattccggcccaaagctcaggtcctgatcgccataggccgaggccaccacttcgctctgttcggcgtgcgccagctcggcaatcgcacggaccgccgccagtttcatctcttcgttgatcgccgtcgcgccgacgtccagtgcgccgcggaagataaacgggaagcacaatacgttgttcacctggttcggatagtcggaacgaccggtacagatgatggcgtccggacgcacttctttcgccagcggcggcagaatttccggttccgggttggccagcgccagaatcattggcgcgcgggccattttcttcaccatctcctgagtcagcactttcgggcctgaacagccgaggaaaatatccgcgccgtcaatgacctcatccagcgtgcgcttgccgctgtcgtctaccgcataggccgctttggtctccgccatattcggctcacggcctttgtaaataacgcccttagagtcgcacaccacgatgttgtgcttttgcatccccaacgcgaccagcaggttcatacaagcgattgccgccgcccctgcgccggagacgaccatccgtacgtcggaaatatttttctctacgactcgcagaccattaagaatggcggccgtactgatgatcgccgttccgtgctgatcgtcatggaaaaccgggatgttcatgcgctcgcgcagtttctgttcaatatagaaacattccggcgctttaatgtcttcgaggttaatgccgccaaaggtcggctccagcgctgcgaccacattgataaatttgtccggatcaagctcatcgacttcaatgtcaaacacatcgatgccggcgaattttttaaacagaacgcctttgccttccatgaccggcttgccggccagcgcgccaatgttgcctaaccccagtaccgctgtaccgttggaaatgaccgcgacaaggttgccgcgcgcggtgtatttgtaggctgccagcggatctttttcgatttccaggcagggcgccgccacgcctggcgagtaagccaacgccagatcgcgttgggtggcaaggggcttagtcggagaaacctgaattttaccgggtaccggaaattcgtggaaatcaagggcgctttgttttaactgctcatccatcttgttgttcctttcacgtatcgttcaaaaagtgacgcggcctggtgcgccgcacattatcaccgtactgcgcaacacaaactttgaaggtctgcaaactatcacgacgcagcgcaagagtttgttatcaacttataacggtcatgttacctgcttataccagcaataccatgcctgtctgctatgctttttggttatgtagtgtatcaatctttcagaagtgtgaatcaacacactcatctaacactttacttttcaaggagtatttcctatgaaccagctagacggcatcaaacaattcactaccgtcgtcgccgatagcggcgacatcgagtccatccgccactaccagccgcaggatgccacgacaaatccctctttactgttaaaagccgccgggcttgagcagtatggtcatttgattgaggatgcgattgcctgggggaaaaaacacggcggtacgcaggaacagcaggttgcggcagccagcgataaactggcggttaattttggcgcggaaatactgaaaagtattcccggtcgcgtctccactgaagtcgacgcgcggttatcgttcgataaagaaaaaagtatcgagaaagcgcgccatctggtggatctctaccagcagcagggtgttgataaatcacgcattctgatcaagctcgccgcgacctgggaaggtatccgcgccgccgggcagctcgaaaaagagggtattaattgcaacctgacgttgttgttctcttttgcccaggcgcgcgcctgcgccgaagcgggcgtctatttgatctctccgttcgtgggccgaatttacgactggtatcaggcgcgtagtccgctggagccgtatgtcgtggaggaagatcccggcgtgaaatcggtacgcaatatctacgattactttaaacagcatcgctatgaaaccatcgtgatgggggcaagtttccgccgtactgagcaaatcctcgcgctaaccggctgcgatcgactgactatctcccctaacctgcttaaagagctgaaagaaaaagaagaaccggtgatccgtaaactggtgccttcctcgcagatgttccaccgtcctacgccaatgacggaagcggagttccgctgggaacataatcaggacgcgatggccgtagagaagctgtcggaaggtatccgtctttttgccgttgaccagcgcaaactggaagacctgcttgccgccaaactataaaccttgcatggagtgatttatgtcccgtaaagaccttgccaatgcgattcgtgcgctgagcatggatgccgttcaaaaagccaattccgggcaccccggcgcgccgatggggatggcggatatcgctgaagtgctatggaacgattttcttaaacataaccccaccgatccgacctggtatgaccgtgatcgttttatcctttccaacggtcacgcctccatgctgctctatagtctgctgcatttaaccgggtatgacctgccgctggaggagttaaaaaacttccgtcaactgcactctaaaacgccaggtcacccggagattggctatacgcccggcgttgaaaccaccaccggaccgctgggccaggggctggcgaatgccgtcgggctggcgattgccgagcgtacgttaggcgcacagttcaaccggccggaccatgagattgtcgaccactacacctatgtctttatgggcgacggctgtctgatggaggggatctcgcatgaggtgtgttcgctggctggtacgctgggactgggcaaactgatcggcttttacgatcacaacggcatctccattgatggcgaaaccgaaggctggtttaccgacgataccgccaaacgttttgaagcctaccactggcatgtcgtacatgacattgacgggcacgatccggaggcggtgaaaaaagccattctcgaagcccagagcgtaaaagataaaccttcgctaattatctgtcggacggtgataggttttggctcgccgaataaagccgggaaggaggagtcgcacggcgcggcgctgggcgaagaagaggtggcgctgacccgccagaagctgggatggcatcatccggcgtttgagatcccaaaagaaatttaccgcgcgtgggatggccgtgaaaaaggcgagaaagcgcagcagcagtggcaggaaaagtttgctgcttatgagaaggcttatcctgagctggccgcggagtttacccgccggatgagcggcggactgccggaggcatgggaatccgccacgcaaaaatttattaacgacttgcaggctaatccggccaaaatcgccacccgtaaagcatcgcaaaatacgctcaatgcctacggtcccctgttgccggaactgttgggcggatcggcggatctggcgccgagcaacctgactatctggaaaggttcgacctcgttgaaagaggatccggcaggtaattatatccactatggtgtgcgcgaattcggcatgaccgccattgctaacggcatcgcccaccacggcggctttgtaccgtataccgccacgtttctgatgtttgtcgaatatgcgcgtaacgcggcgcgtatggcggccttaatgaaagcccggcagattatggtctatacccacgactccatcggtttgggcgaagatggcccgacgcaccaggccgtggaacaactggcgagcctgcgcttaacgcctaacttcagcacctggcgtccctgcgatcaggttgaggcggcagccggctggaagctggccattgaacgtcagcacgggccgacggcgctgattctctcgcggcagaatctggcgcaggtggaacgcacgccggaacaggtgaaagcgattgcccgcggcggttatattctgaaagatagcggcggcaagccggatatcattctgatcgctaccggatcggaaatggaaattaccctacaggcggcggaaaaattgactggcgaggggcataacgttcgcgtggtgtcgttgccttcaacggatattttcgatgcgcaggacgaggcatatcgcgaatcagtgctaccggcacacgtaaccgcccgcgtcgcggtggaggccggtatagccgactactggtataaatatgttggcctaaaaggcgcaattatcggcatgacgggatacggtgaatccgctccggctgacaaactgttcccgtattttggctttaccgtggaaaatattgtagaaaaagcccgccgggtgctaaacatcaaaggctaaggcgagcgttagcaacacagactttgcacagtctgcagacctgttctgtaggctgtgcaaaattacttcgtagactcaggcgcatctgactgcccgatgacgacctcatcaatggatttatggcacatcaggcaaaaggccttttttttatgcgcctgcaatgttgaatcccacgccgctgatccgccttctttattcactttttctcttatcgccgccagccgatctatttcataataagcgctcaggcagccacaatgggggcataatacggggccattatttattttcatactatttcctgctgtggtgaggctatcgggtaaagtaacaatcctaccgtaacgtagcaatctctataccataaatgaaacctcaataggtgtatccctattctgaaaaggggataacaaccaggattcaacgcgtgatccacagcgtaggccaggcatccggcccgtgccagctatcgcagctcggttcttcggcataacgcaccagacgaaaacgatcgccatcataacgccagcgcgtctggataccgcagtcggttaacccccgccctttcgccaacgtcaccagctcgcgcgttttctcgtcaaagaaggcgttcatcaactccatgtcattactttcgacgccgcgattaaacggcagccgcaaacgtacggcgcgcgagacgagcgtttttttgcgtgaaactacccaggcgagatcaatagtgttataggcgccggcttcgcagttaacaatcaataacgctttatcatccgtcaacgcgctgacctgcgtctcgcgacgcagcgggtcaagcgaacaacgaatgccgtttacccgccatgctgcgtagtccagcagatcgtcgcgttcttcctcactcagcggtacgggcgttggattaatcacggcgatcccctttaatgccggtgccgggggcacgctgagcggcggttcgtttcctttttcaatccaggcggtttcgctgcccacacgtttttgttgcgcgtcgataaacagtaatgccgcttttaatcccgccagcgaaagcgtctgaacgccgttttttaaggtgatggcctgcgcatcctgaatcgtctgtaaaaatgcggtgatggtggcaggatcgccggtcatgagatgccagggcgacacgcgccagtgtggactgttgaacgaaagcggtttgccatccagcaataagcgaggcgcaattgcggcttctttagcgtcgggcggcgccaaaccgccgcggtcgatacgcagtaccgcatcggtacgcgccccggcgctgcggcttaatgtcatcaccagcccatgatgttcgccagtattgcgcgctacgcaaaaattttggttattgcaggtgacctgccagtcggaaaaagtccgttgcgctggcgcagcccacagtagctggaccggcaacaggccaaacagacaaaaaagaataacgcggtagcgcatgaacggaacaaccccagattcagaacaacacagctaaggcggtatcttccttgcgcgcctcagggttctcaatcagatttatcggattggtcttttttgtgtaaagaaatatatttcttttttttcagtccattagatgagacgtctgtaaatagttaagcaataacacggtcttaccgtcccgaatctcgcctgagcgcaccatttccagcgcccgggaaaacggtagttcaagcacctcaatctcttcgtcctccacgccgccgccgatgctggcacgctcgctatcatgatattcggcaatgaagaaatgaatcagctccgtgacgccgcctggcgacatataaagctcaaatatcttgcgtacctcaccaacgtcataccctgtctcttcaatggcctctttacggatacagacctccggctcgtcgttatcaagcaggccagcgcaggtttcaattaacataccgtcttgattaccgttgacccatgtcgccacgcgaaactggcgaaccagaaccacggtttttttagttgagttgtaaagcagaatggttgcgccattcccgcgatcgtaaacctcacgcttgtgacggataacctcgccattacgacgggtcaggtcataggtaatgttgcgcagagtaaaataattatcagaaagaattttatccttaataagcgtaatggtttgcgacatgctggctccagggtgtaaaaagagcattaatattacgccgtgaggtcggttttgtctgctgaagggttaatccttaatgccgactgaacggacgtacagccatatttttctgtcactgccatgaccatattctgcttctccgggccgcagagtccatgctcgcgatatgatttgacggccggagtgagactgagggaatcatcatgaaatttactctcgttgcgacggttctactgacgttttccctttcagcttttgccgttgagtatcctgtattgaccaccgcgagccctgatcaggtggggtttgatagccaaaaacttcaccgacttgatggctggattcaaaatcaaattgatgccggatatcccagcatcaatcttctggtgataaaagataatcatattgttctacaaaaagcctggggctatgccaaaaaatatgacggttccacgctgttagcccatcccattcgggcgaccactaacacgatgtatgatctggcttcaaacacaaaaatgtatgccactaacttcgcattgcaaaaactagtgtatgaaggaaaaatagatgtcaatgatttggtatcaaaatatatccccggctttaaggatatgcctggggataaaataaaaggcaaaaataaactccgcattattgatattcttcatcacgtcgcgggctttcctgccgacccacaatatcctaataaaaacgtcgccggtaaattattctcacagagtaaaagcactactctggagatgattaaaaagacaccgctggaatatcaacctgggtcgaagcatatctacagcgacgtggattatatgattcttggttttatcattgaatcgataacggcaatgccattagatcgctacgtcgaaaccaccatttataaaccgctcggattaaaacataccgtctttaacccgctgatgaaaggcttcacgccgccgcaaatcgccgcaacggaactacatggcaacacgcgtgacggcgtgattcatttccccaatattcgcaccaatacactatggggccaggtgcatgatgaaaaagcctggtactcaatgggcggcgtttcaggacacgccggactgttttctgacacccatgatatggctgtgttaatgcaagtcatgctcaatgggggcggctacggtaacgtgaagctattcgacgacaaaacggttgcgcagtttactcgccgctcgccagaagacgctacctttggtctggggtggcgcgttaacggcaacgcctcaatgacccccacgttcggggtattagccagtccgcaaacgtatggacataccggatggaccggaacgctgacgtctatcgatccggttaatcatatggcgattgtgattttaggtaacaggccgcactcgccggtagcaaatcctaaagtgaatccgaatgtttttgtcagtggattattacctgcggcgacgtatggctggattgttgaccagatatatggttccttaaaataaaaattaagagcctatctctgtaggcgttattggcgcagccagtttggacacggacagcgcgcaaaaaccggagcgtacacgtagtacgtgaggtttgactcgctacgctcgcccttcgggccgccgcaagcggcgttcaaaacgctaacgcgttttggcgagcactgcccaggaccaaaatggcaagtaaaatagccctaatgggataggctctaagaaggggttctgatagcgtcccttccttcaatttacactctattttcaatactaagattgtcctcatcaggcctgttaaacgtcgccccgacgggaaaatgtttatcgcagggcgttcagccctgcgagcgtcaacatttctgcaaacggagtaaggttagccaataagtttaagattttttatcactcaatcatttaaccgttccaggccttaaccggcctacaaatacgcttatttagctaaccagtcgagtatcccctgcgcagcatgtcggccttctgccatcgccgtcaccaccagatcggcgccgcgcaccgcatcgccgccggcgaaaattttcgggttggacgtctggtaacgaaactcgctctcgacgctggcggcaatacgtccccagttatccaccttcacgccatgcgattccagccacgacataccatgcggatgaaaaccaaacgccataatgaccgcatccgccggcatcacgaactcgctgtccggtacaggtaccgggcggcgtcgcccctgaccatccggttcgccaagccgcgtacgcaaaaagcgaataccgctggcgcgcccgtgcgtatccagcaccaactcaaccggctgaacgttaaattcaaagttcgcgccctcttcccgcgcgtttttcacctcttttttcgaccctggcatattggcctcatcgcggcgataagcgcaggtgacgttagcagcgccatgacgcagcgccgtacgtacgcagtccattgcggtgtcaccgccgcccagcacaaccacgttaaggcccgcagtatcaataaacggctcgtcaggcaacgccggaagccccatcacctgtttggtattggcgatgaggaatggcaacgcatcatatacccccggcgcatcttcattcggtaaatcagccttcatggaacgataggttccaaccccaacaaagacggcgtcataactctccagcagcgtctccagagaaatatctttccctacttcgcagttaagctcgaaacgaatccccatcgcgctgaagatttcccgacggcgcgccagcagagatttatccagtttgaaagccggaataccaaaggtgagtaaaccgccgatttccggatggcgatcgtagacggtggcgcttacgccatggcgcgccagcacgtcagcgcaggcaagacctgccggccccgcgccgataatcgccacgcgcttatcgctcttctgtacgtccgacaggtcgggacgccagcctttgctcagagcgcgatcggagatatagcgctcaatgttgccgatggtaaccgcgccatactcatcgcggagtgtacacgcgccttcgcatagccgatcctgcggacagacgcgcccggtaatttccggcagacagttggtctggtgggaaagctctaccgccgcatcaatatcgccggctttcaccagttcgatccactggggaatatggttatgcagcggacaggtccattcgcagatactgtgttccccgcatgtgaggcagcgggacgcctcacgctccgcctgcgcggcgcgaaacggcagataaatttcctcaaaggtggttttacgcgcttcaatcgccagtttatccggttcgccgcgcggcggcgtcgcctgcatacgctcggctttgctgcttgctgccccactgtgttgtgtatccacggtatgccaggggcgaatctcctgccgggcggtacgcagccgtcgcgttttagccagacgggtcaacgagtcttcggtgaccagttgcagcgcatccgccgggcaattttccacacaggccggcccctgttcacgtccctgacacagatcgcatttatgcgcgctggctttgaactggtttggcgcgacgggcgtcaataccatctgcatggtgccgaatggacaggcgacgacgcaggatttacagccgatgcacttctgcgcattgacctgcacgctgtcgttaatatgcgcgatcgcgccgttcggacagctacgggcgcagggcgcatcttcgcaatggtgacatgtaaccgcgctgcgctggtgctgatgtttaatgacagtaattcggggctgatagcgctgtgacgtcaggacatgtcgctcatcattgtgagccattacgcaggcgacctcgcaggcatggcagcccagacactgctggctattggccataataaaacgattcatggcgtccttctgttttggttgcaaaaaccttattctttatatgagcattgttattaactgacgaaggcggggtcggcaatgttcatctgcccaggaagcacaactatctgtccagaacctgtggcagatcaatttatttcaaagcaaatgaaattgcggttcagctaaatgcggggagtaccagtgtgacggttaaacgcccggtctcggccagtctggctaaggcttttttctatattgtgctgttgtctattctgtccaccggcagcgcattactgacgctgaccagcagtttacgggatgccgaagcgatcaatatcgccggttcgctacgaatgcagagctatcggctgggttacgatctgcaaagccgtagcccgcagattaatgcgcatcgtcaacttttccagcacgcgctcaactcgccggtactgcaaaatctcaacgcctggtatgtgccgcaggcggtaaaaactcgctacgagcgcctgcacgccaactggctggagatgaatagccgcctacaggacggcgacattgcctggtatcagaccaatatcaacaattacgtcaatcaaattgatctcttcgttctggcgttacagcattacgccgagcgtaaagtcatgctggtcgtcgccatatcgctggcgggcggtatcggcatatttacgctggtcttttttaccctacgacgtattcgccagcaggtcgttcgcccgctgaatcaactggtcaccgccagtcagcgaattgaacatggtcagttcgccccgctgccgctggataccagcttacccaatgagctgggattgttggcgaaaacgtttagccagatgtcgagcgagctgcataaactttatcgttcgctggaagcctcggtggaagaaaaaacgcacgatctgcacgaagcgcaccgccgcctggaggtgttataccagtgctctcaggcgctgaataccagccaaatcgacgtccactgttttcgccatattttgcaaattgtccgtgaacatgacgccgcttggtatctggagttaaccgtgggcgataactggcggattagcgaaggcacgcaaagccccgacctgccgatgcaaatgctgccagtgacgatgcaggacacggtctatggcgaactccactggcaaagccccaacgttaatgcctctacgccgctgctgaacagcgtctccacgatgctggggcgtggtttgtactttaatcaggcgcaaaaacacttccagcaacttttgttaatggaagagcgcgcgacgattgcccgtgagctacacgattcgctggcgcaggtactttcttatttacgtattcagttaacgcttttgaagcgcgctattcctgaggataacgccggcgcgcaaagcatcatggcggatttttccagagcgctgaacgacgcctaccgtcagcttcgcgagctactcaccacgttccgtctgacgttacagcaggccgatttaccctccgcattgcatgagatgctggaagatttacagagtcagaccccggccaaactcacgttggattgccgtttacccacgctggcgctggatgcgcaaatgcaggtgcatttgttgcaaattgtgcgtgaagcggtcctgaacgccattaaacacgccaacgcgagcgaaatcgccgtgagctgcgtcaccgcgcctgacggcgatcataccgtttatattcgcgataatggcattggtatcggcgaaccgcatgagcctgccggacactatggtctgaatataatgcgtgagcgcgcggagcgccttggcggcacgctgaatttttcgcaaccctccggcggcggcacactggtcagtatcagttttcgctcctccaacaaggaagagagtcagttaacgtaaagaacggcaaatcgccggaaggccagatgtcaggctttccggcgttggcacaaaaagtatgctgtaaaagcgcatgataatttacattatctcctttatttctccacgtttggctcgtagcttgccgctacagtgaagcagttcaaatctataacgatatgtagaaacacgaggtttccctttaatggcgaatttttttatcgatcgccccatttttgcctgggtgctggctatcctgttgtgtctgacaggggcgttagccattttctctttacctgttgaacaatatcccgatctggcgccgcccaacgtacgtattaccgcgaattatccgggagcgtcggcgcaaacgctggaaaataccgtaacccaggttattgagcagaatatgacgggcctcgataatctgatgtacatgtcatcacaaagcagcggaaccggacaggcgaccatcaccctgagctttattgcgggaaccgatcctgatgaggcggttcagcaggtgcaaaaccagttacagtccgcgatgcgtaaactgccgcaggcggtacaggatcaaggcgtcacggtacgcaaaacgggcgataccaatattttgaccatcgctttcgtctctaccgacggttctatggacaagcaggatatcgccgactacgtcgccagtaatattcaggacccgctcagccgcgtcaacggcgtcggcgatattgacgcttatggttcacagtactctatgcgtatctggctcgatccggccaaattgaatagttttcagatgaccacgaaagacgtgaccgatgcaattgagtcgcagaatgcgcaaatcgccgtcgggcagcttggcggtacgccttcggtcgacaaacaggcgctgaacgccaccattaatgcgcagtcattgctgcaaacgccgcaacaatttcgcgatatcaccctgcgcgttaatcaggacggttccgaggtcaaactgggcgatgtcgccaccgtggagctgggggcggaaaagtatgactacctcagccgttttaacggcaatccggcttccggtcttggcgttaagctggcctccggcgcgaacgaaatggcgaccgcgaagctggtactggatcgcctcaacgagctggcgcagtacttccctcacggcctggaatacaagatcgcgtatgaaaccacctcctttgtcaaagcctcgattatcgatgtggtcaaaacgttgctggaagctatcgcgctggttttcctggtgatgtatctgttcctgcaaaactttcgcgccacgctcattccgacgatcgccgtgccggtagtattaatgggcaccttctccgtgctttacgcgtttggctacagtattaacacattaaccatgttcgcgatggtgctggcgatcgggctcctggtcgacgatgccatcgtggtggtggaaaacgtcgaacgtatcatgagcgaagaagggctcacgccgcgtgaagcgacgcgcaaatccatgggacaaatccagggggcgctggtcggtatcgcgatggtgctgtctgcggtattcgtgccgatggcgttctttggcggtaccaccggggcgatttatcgtcagttttctattaccattgtctcggcaatggtgctgtcggtgctggtcgccatgatcctgacgccggcgctgtgcgcaacgttattaaaaccgctgcacaaaggcgaacagcacgggcaacgcggatttttcggctggtttaaccgtaccttcaatcgtaatgccgaacgttatgagaaaggcgtagcgaaaattttgcatcgcagcctgcgctggattctgatttatgttctgttacttggcggaatggtgttcctgtttttgcgcctccccacctcctttctgccgcaggaagatcggggcatgttcactacgtctatccagctaccgagcggttctacgcaacagcagaccctgaaagtcgttgaaaaggttgaaaactattacttcccccatgagaaagacaacattatgtcggtcttctcgacggtaggttccggccctggcgggaatgggcaaaacgtcgcgcgcatgtttgttcgcttgaaagactgggacgcgcgcgatcccaccaccggctcctcgttcgccattattgagcgggcgacaaaagcatttaaccagattaaagaagctcgcgtcttcgccagcagcccgccggcaattagcggtctgggcagctccgccggttttgatatggaattacaggatcacgccggagcaggccatgacgcgctgatggccgcacgagatcaactcattgagctggccgggaaaaacagttccttgacccgcgtgcgccacaacggcctggacgacagcccgcaactgcaaattgatattgaccaacgaaaagcgcaggcgctgggcgtatcgattgacgatatcaacgacaccctgcaaacagcctggggatcgagctacgtcaacgactttatggaccggggccgcgtgaagaaggtctatgttcaggccgcagcgaaatatcgtatgttgccggatgatattaatctttggtatgtccgtaacaaagacggcggcatggtccccttctccgccttcgccacctcgcgctgggaaaccggatcgccgcgtctggaacgctataacggctattcggcggtagaaattgtcggagaggccgcgccgggggtcagtaccgggacggcaatggatgtcatggagtcgttggtgcatcagctaccgggcggttttggcctggaatggacagccatgtcttaccaggaacggctctccggcgcgcaggcgcccgcgctgtacgctatttcgctattagtcgtcttcctgtgtctggcggcattgtatgaaagctggtcggtgcccttctcggtgatgctggttgtgccgctcggggtcatcggcgcgctactcgctacctggatgcgcgggctggaaaacgatgtttacttccaggtggggctgttgaccgttatcggcctctcggcgaaaaacgcgattctgattgtggaattcgccaacgaaatgaatcagaagggacacgcgctgttagacgccacgctgtacgccagccgccaacgcctgcgaccgatactgatgacttcgctggcgtttatctttggcgtattgccgatggccaccagcaccggggcaggctcgggtagccaacatgctgtcggaaccggcgtgatggggggaatgatctcagcaaccgttctggctatcttctttgtacccctgtttttcgtgctgatacgtcgccgcttcccgctgaagccgcgcccgaaataagatcccggccagcctgatacgaggtgtcgggcacaaaaaaggcgactttcgttgagtcgccttttcttatcccctatgggagcgcggtgccttccaggcatttatttacgaagcatgacttcgataaaatctttccagttccccagttcacgttcaatcataatagcctctcttattattatgggtattctacgtagttagcggtatagagagaagttcatttaaccgattgttgcgatatcctctggttatgctgtctatgatattactatggcgctgtagccataaattttatgtgacttactgcaatatttagcaacattaataccttttctactactttatcaaattgggttaaaaaacaaacaattgcatatgcacaaaataggatttataccgcgaagtataaacaagccacatctggaacgttttggaatcattattcacattcactcaacaatgttatattgattgccgatcagcgctggataaataaccataaacggccacacttattatcccgcagacgatactattgattatttattcgaatttcgcgttaaaggattcaatatgattaccctctatggcattaagaattgcgacacgatcaaaaaagcgcgccattggctggaggaacatggcattgattatcgttttcacgattaccgtgtggatggcatagacctccctcttcttaatacctttattgccgaactcggctggcagcctttactgaatacgcgcggcacaacatggcgcaaactggatgaaggccaccgcagcgggattaccgatgccgactccgccgctgctctcatggttgaacagccggcaatcatcaaacgcccattgctctgcgcgcccgggaagcctatgctgcttggtttcagtgaatcccgttatcagcagttttttgatgaggtgtagtctatgtcgtgcccggttattgagctgacacagcaacttattcgtcgcccctccctgagtccggatgacgcaggctgtcaggcattaatgattgaacgcctgcgtaaaatcggttttaccattgagcatatggattttggcgacacgcaaaatttttgggcatggcgtgggcgtggcgaaacgctggcgttcgccgggcatactgacgtcgtaccggctggcgatgtcgatcgctggatcaatccgccgtttgagcctacgattcgcgacggaatgttgttcggtcgcggcgcggcggatatgaaaggttcactggcggccatggtggtggctgctgaacgttttgttgcgcagcatcctcatcaccggggccgcctcgcatttttgattacctctgatgaggaagccagcgcaaaaaatggcaccgtaaaggtggttgaagcgctgatggcccgtaacgagcggctggattactgtctggtcggcgaaccttccagtactgaaattgtgggcgatgtcgtcaaaaacgggcgtcgcggttctctcacctgtaacctcactatccatggcgttcaggggcacgtcgcctatccgcatctggcggataaccctgttcatcgcgccgcgccttttcttaatgaactggtcgctatcgagtgggatcggggcaatgactttttcccggccaccagtatgcaggtagccaatatccaggcaggcaccggcagcaataatgtcattcccggcgaactgttcgtgcagtttaacttccgtttcagcacggaactgaccgatgagatgatcaaagagcgggtacatgcgctgcttgaaaagcatcagctacgctataccgtagactggtggctttccgggcagccgttcctgaccgcacgcggcaagctggtggacgcggtggtaaacgccattgagcactataatgaaattaaaccgcaattactgacgacgggcggtacgtccgacggacgttttatcgcccgtatgggagcgcaggtggtagaactggggccggtgaacgccaccattcataaaattaatgaatgtgtgaatgccgccgatctccagctactggcccgtatgtatcaacgcattatggaacagctcgtcgcctgatgagcgttccggtaagaggaaataagcatggactggctggcaaaatattggtggattctggtattggtgtttctggtaggcgtactgctgaatgtgatcaaagatctcaaacgcatcgaccataagaaattccttgccaataaacctgagctgcccccgcatcgcgattttaacgataagtgggacgatgaagacgactggccgaagaaagatcagccgaaaaagtaaccggatatcatgccggacaggtatcgctatccggcatggtccccaccgccgggcattacgtcgcgcaaactctgcgttcgtccggcatccaacgcaattagcgcctgcgccgcctgcgcacgctgcaacgccagcagagctttacggcctgaaatgcgtagccgggcgcacagttcggcatcgctggctttttcttccagccgccctctcagcgccggtaatggcaatgcgctgtattgcagtaaacgatgcaggcaacctaacgatgtcagtagcggacggtgcgcgaacgcaaaaccgaccagctcacgccagtcttcatcattaagcgcctgttcgcgcaacgccgccagcggtatcgcctcgccgttccactgcgtcaggatatccgcatcgcggcgcaaacgccggtgttcctgctgcgccagccgttttcccgcgtcgctcagcggcaataacgccatcgccgtatagcaaccgctgctcgcctcccgatggttgcccatccgtaccagtacaaagccgcagcgttgccagaaacgccacagcttcggcgtatagccgaagctgacggaaagataatcacactgcgccgcctgcatgcacgcgcaggcaatcaactgctgaccgatgccttcacgctggcgagcggggtgcactgcgatacggcttacgcgacgcccaaccagcgtcgcggctaaagggtcgctaccgtgcgccgccagcgactgcgccaccagattcccacgcggccgccggaaaccgcaccatacagcctgactgagttctgcggataacccgccctcttcgaccagccagagggcgcccgccacacggttattcgccgtagcctgcaagaaatgctgtcctggcgcatccatcattcggcgcagatccagcggcgaagtacgatagtgcgcccccgacagtaactgatacacagccctcggcaacgcgggcgtattcacccaggcctgttggtaaaacgccgagatttctatcgcgccatgtggcgcctgcgcaaacgcttcatcgtcgaatatcagcgcctcgctgacgatattttccagcgggcattctggcgcccagcggacaggctgacgaagcgtgaagcggtgaagctgcggaaaacgggcgcaaaacttaagtaaaaaaccgcgtccggtgccttcgtagccctgaacggtggtggtgagtagtatgcggggaaagcgcgaaaccagttgcagcagcagcggcgtggggattgccgccgcctcgtcaaccaccagccagtcggctcttgccccgctcgccagcaacgcatccggcgccataaagcagaaccgctcaccggcaaacgctgccaggatatccgttgccgttttcgccggtgcggtcacgatagccgtgcccgccatccgggagatgaattgcccggccagcgccgatttgccgcgcccacggggggcaatcaccgtcgccacgccgggcggcatttcacgtaaacgcgataagatagccgcctgctccggctgcggctcgccggtggcgggtcgccagcattcacgggaaggataagatggccagcaaaacggctggcgctgtcgccaaagcagcgtttgcggatcgcgggagagagtccgtttaagatgctgtgcaaactgcggtgtggggataggctgcgcgcagtcgctccagcgcagtgaatcggtatcaggcctgctttcccacgtctcgtacggcggcatcagcagaagcagccagcttccggcctgcaaggtcccgctcagggcggcaaacgctgcggcgtcaaagccctgccaggcatcaaatatcgcatgacggaattcacggcccagcagcgtttgtaacgcctgtggcgtacagcacggctgggcgggcgcgtcaggcgcgacccacagccagtcaccgggcaatgcagcgcgtatcgcctcggcccgcttccggcaccacgccgcatcgccgctgatgaccagtaaacggcgaatgccttcctgtgtcatttgcgacgttaacgcctgtagcgcatcgatatcagacatccctgccccggtttatcaaaagtttttgccaaacgtattacattgcgccgggtcaccgctgtcaaatccacgcttaaaccagctgtagcgctgttctgaggtgccgtgagtaaaactatccggcacgacgcgcccctgcccctgttgctgtaagcgatcgtcgccgatagcctgtgcggcattgagcgcctcttccagatcgcccgcctccagtacgccttgctgctgcatactgtgtccccacacgccggcaaagcaatccgcctgtagctccatgcgcaccgaaaggcgattcacctccgtttgcgacgcgttttgctgcaactggcgtactttcggctcaatacctaacagtttttgtacgtggtggccgacttcgtgggcgatgacataaccctgggcaaaatcaccgtccgcgcccagcttatttttcatatcatcgtaaaatgagagatcgatataaacggtgccgtccgccgggcagtaaaacggccccatcacggactgacccgcaccacagccggtgcgcgtcataccacggtacatcaccagttttggctgctgatagccgcgccccattttttgaaagagttgaccccaggtatcttcggtcgtcgccagaatcaccgaggtaaattttgccgcttcatcatcattggggcttatcgaacgcgtcgactgctgctgcgaaaccggctggccggtcaacagaccggttaaatccaccccatagtaccctgcgaccaacaccaccaccaacagaatgatgccgccttttccgcgcggaagacgaaagcctgggccacccagcgaggggccgcctggccgattacgtctgtcctctacattgttgctttcacgacgcccttgccagcgcataatcacctcattctctctttgttatacagatgatcgtaggcggtcaggcgcaggattaccacaggtaaacgctatcagaatgaggaaaggatgataccggagagcggttgccccccggtcagaagcggaattaatctaatttcacgcccaggcgatgcgcgacggcttcataggcttcaatcagaccgcccaggctctggcggaagcggtctttgtccattttgtccagcgtctctttatcccacaggcggctaccgtccggcgaaaactcatcgcccagcaccacttcgcctttatacaggccaaactccagtttgaaatccaccaggataagacccgcgtcatcaaacagttttttcagtacgtcgttggctttgtaggttagctctttcatacgcgccagattttcctgacttacccaaccgaacgtttcacagtaggaactattcaccatcgggtcgtgcagcgcgtcgtttttcaggaacagatcgaatatcggcgggttaagctccatgccttcttccacgcccagacgcttgaccagcgacccagccgcacggttgcgcaccacacattcaaccggcaccatctccagcttcttcaccagacactcggtatcagacagcaaacgttccatctgggtcgggatgcccgcctcggccagtttggtcataatgaaatggttgaatttgttatttaccatgcccttgcgatcaaactgttcaatgcgcgcgccatcccctgctgacgtatcattgcggaattcgagcaccaacaggtccgggttttccgtgctgtatacggttttcgctttaccacgatacaactcagcttgcttttgcatctttaacactcctgggtgtgaattaacgataagtattcatttcctgctacgcctgccggagacgccggcctgtaattgtggtgcgaaatagcggttaaatcgcgtttttgtaccgacgcacacgtttgcgtatcttatcagaaaaaagggccggattgctccagccctgttaaattacttgttgaacgctgcctggaagacggcaaccagcgcgtcgttctggctttgcgtcagagtatgccccttaggatcgataaactgcaagctgctgcggttatctaaatcgccaacctgcaatttatagtctccggatgccaggcccgggtcgctagcgcccagatcccgccagtcgctgtcagacaacggtttgtacgttaccgccatgctgccctgagagcgagtgctgtcggtgactttcatgcccactttttccagcgcggccgggaggcgctgccacacgaggttgaacggaccgcgaacgaccagcataggtaaaccggtatcatcagcggcgctctgcacatccatcgttgcggcggaacggttctgcgcggcatttgccgcatccgtagcggtcttatccagaccggcggaaatgacgttcatcatttccgtgctatagcgctgcagcgacgccgcgtcagcgaccggcttgccagcctgttccagattaaccagttttaccgttaccgcctgctgatagccctgcggcttcaccgagatttgataacgtccacgatactgttcgtcttcatccaggcgattccagttcacccaatcggtcgtcagggtctggctggcatcgtcacgtttttcaatcggataatttttcgcctgaatcacgctgacgacttgcggccacagcgtgctgctccggccattttccaccaatagcgtagcggtatcgccagagaactgggtacgcgcgccgctcactaacgctaacggctgcgccggcggacggatatccaacgccttaccaaccgcgccgctccccttcgtgaccggaataacgtagtcgccggtcgttatcggcaggatcattcctgccggggcgtgaagttcagcaagcggcgcggcatccagataggattcatcgccgcttacctggcgcttgtagcgcgaatcggaactacaggcagcgagcagcaaaacaagcgaaacacccgcaaccttcgccaggcgcgacttttgtactgagtaagccatcaaatctccctaaactttacagcaggccagcatgctgaagcgctgctttgacgatgtcacgaccatggtccgtgataggcgtcattggcaggcgcagcgtgtcggtcgccacaagacccaatgccttacatgcccatttcaccgggataggattgggttcgacaaatagtttgttgtgtaacggcatcagacgctggttgatagcgcgcgcctcggcaaattgcccttccgccgccagtttgcacatgtcagccatctcgcgcgccgctacgttagccgtaacggaaatcacgccatgaccacccagttgcataaagtccagcgcagacgcgtcatcgccgctaagcagaataaaatcgtctgaaaccagctctttgatctggtgaacgcgggttaagttccctgtcgcctctttgatagcgataatattttttatttccgccagacgacccacggtttccggcaacatatcgcaaccggtacgggacggcacattatacagaatttgcggcaagtcagtgtgttccgcgatggctttgaaatgctggaacaaaccttcctgcgtggggcgattgtagtacggcgttaccgtcaggcagcctacaataccgctatcgttaaaacgctgcgtcaggctaatcgcttccgcggtcgcgtttgcgcccgtgccggcgataaccggaatacgtccgtcagccagttccagcgtcatcatcacgacatcgccatgttcatcatggcttagcgtggcagactcgccggtagtgccaaccgaaacaatcgccgaggtaccgttggcgacatgataatcaatgagttttttcaggcaagacctactgacgttacctttctcatccatcggcgtaacaagcgcgacaatacttcccgtgaacatgggccatcctctgtgcaaacaagtccctcaatggtacgtttggtatggcaataaaagcaagcgaccaaagccgttctgattgttgtatgcaggttttttttatggtttccttaagattacctcaccgctcaaaggaataactggtttgacaccgtcatcacaacactatttggttatcactgcgctgggcgccgacaggcccggtattgtgaataccattactcgccatgtcagcagttgcggctgtaatatcgaagacagccgactggcgatgctgggcgatgaattcacgtttattatgctgttgtccggcacgtggaacgcgattaccttgattgaatcgacattgccgttaaaaggcgcggagctggatctgctgattgtgatgaaacggacgtccgaccgcccccgcccggcaatgcccgcgacggtatgggttcaggttgaggtcgccgactccccgcatttaattgagcgattcaccgcgctgtttaatagtcatgaaatgaatattgcggagctggtctcccgcacgcagccggctgaaggtgataaagctgcgcaattatttattcaaatcaccgcacatagcccggcgtcgcaaaattccgcaaatattgagcaagcctttaaagcactatgtacagaactcaatgcgcaaggcagtataaacgtcgtcaattactcacaacatgatgaacaggatggagttaagtaatgaatccactgaaagccggtgatatcgcaccgaaatttagcttgccggatcaagacggggaacaagtaaatttgaccgacttccagggacagcgcgttctggtttatttctacccaaaagccatgacacccggctgtaccgtgcaggcctgcggcttacgcgataacatggacgagctcaaaaaagcaggcgtggacgtgctgggcatcagcaccgataaacctgaaaaactctcccgtttcgctgaaaaagagctgctgaactttacccttttgtccgatgaaaaccatcaggtgtgtgaacagttcggcgtctggggcgaaaagtcgtttatgggcaaaacgtatgacggcattcaccgcatcagctttttgattgacgctgatggtaagattgaacacgtctttaatgattttaaaaccagcaatcaccatgatgtggtgctgaactggctgaaagaaaacgcgtaaaagcctcaggccgcgctgatgtgcggcctggaaagggaatgcgccgtcaggcttgccgcgccagacgcccttctccggtcatcaccagatcggcatctttaaccgcctgctcaagctgtagcgtttccacgacaatctctacgccggcgcgtaattcagcattgagcaaccctaaaagcgcggcgcccattccgcctgccgcgccgggagcgttaatcacctcacgtcccgtagcctgataaatatgccggccgcagttttccagcgcctcgtccagggtgttcaccatttccgctgtcgcccctttttgtgggccaaaaatggccgatgcgccctgaggaccacacagcggattgttgacatcgcacgcctttaagctgattggcggtagcggaatcaatttctacaatacagttttccttcagcagcgagaattttgtaggttccgacaataaaaatgccgcaacacggtgcggcattaaaaaaaagagcggctttctaagcgcttgtccctcatcaggcgtgcgcaaaatggcggcagggcactatgatgtcgttcacgctttacaacttttgtactgaccgctcaggatgaggcatccgtcacctgaccatccggccaggcatggacaacggctttaatcagcgtcgccaatggaatggcgaaaaacaccccccagaaaccccacagaccgccgaaaatcaccactgacagaataatcaccagcggatgcaaattcaccgcttcggagaaaagtaccggtaccagcaaattgccatccagcgcctgaataatgagataaacggcaaaacagctccagaattccgtccccagaccaaactgaaacagcgcgacgcccaccaccggaattgtcaccacaaaggcgccgatataggggatcagaaccgaaaagcccaccagtaccgccagcagtagcgaatagttgaggccaaacagcaaaaaacccagccaggtcgctacgcccaccaccaccatctccagcacttttccgcggatatagttggtgatctgctgattcatctcattccacacctgccccgccagcccgcgattacgcggcagcacgcggcgcacggcattcagcatctgctctttatcttttaccaggaaaaagaccatcagcggcaccagcaccagatataccgccagcgtcagtagcccgactaacgaagccagcgaatacttcaccaccgaatcgcccatgttaagcatccgggtacgcatgttttccgccatcgcatcaataatgcccgcatccatcagcgccggatagcgtcgcggcaaggtcgcggcgaaatcggacagtttattcagcataccgggcatatcacgaatcaggtaaataccctgctgccaggcaatcggcatcaccacaaacgccattaataacagaatgccgacaaaaaggataaggacaatggaggctgcccagcgccgggaacagccaatcgcctgcaggcgcgccgtcggccactccagcaggtaggccagtacgatagcgaccagcagcggcgctaacaggccgctaaagaaaaagaggatgctaaaaccagccaccagaatgaccagcaaggcaatcgcctccgggtcgctgaagcgacggcgataccattgcattaacatttcgagcataaaacccttcccagaactcaactgcgggattgtgatgccgaattgtatcgaaatgtcacaaaaaagacttcgctttttatcgttgattcaggaaactaaaatagtgagtctgtgctcatcacagttacacttatgaagtgtcggagcgtggaacgatatttcacgacgttggtcaaagggctatctcaaaacaacaggatagaggttatgttcaggcagttgaaaaaaaacctggtggcaaccctcattgcagcattggctctcggtcaggtcgcgcccgcatttgccgaccctgccgacacgctgcccgatatgggaacctcggcaggaagcacgctttctatcggacaagagatgcaaatgggcgacttttatgtgcgccagctacgcggcagcgcgccgttaatcaacgatccgctgctggtgcaatacattaacgcgctgggtatgcgtctggtctcgcacgccgactccgtcaaaacgcccttccattttttcttgatcaataatgacgaaatcaacgccttcgcgttctttggcggcaatgtggtgctgcactcggcgctttttcgctacgcggataacgaaagccagctagcttcagtcatggcgcatgaaatctcccacgtgacgcagcgccacctggcgcgcgcgatggaagatcaaaagcgcagcgcgccgcttacctgggtgggcgcgctgggttccattttgctggccatggccagcccacaggccggtatggcggcgctaaccggtactctggcgggaacgcgccagggaatgataagtttcacccagcaaaatgagcaagaagccgaccgtattggtattcaggtactgcaacgcgccggatttgacccacaggcgatgccctctttcctcgaaaaactgctcgaccaggcgcgttactccacgcgcccgcctgaaattttgctcactcaccccttaccggaaagccgccttgcggatgcccgcaaccgtgccaaccagatgcgcccggtcgtggtgcaatcttccgccgacttttatttcgccaaagcgcgcgccctgggaatgtacaattccggacgtaaccagcttaccagcgacctgctggatcagtggtctaaaggcaacgtgcgtcagcaacatgcggcgcaatatggccgggcgttgcaggcgatggaagcgagcaagtacgatgaagcgcgcaaaacgttgcagccgctgttaagcgcggaaccgaacaatgcctggtatcttgacctcgccaccgatattgacctggggcagaaaagagccaacgacgcgattaatcgcctgaaaaatgcccgcgatctgcgcgttaatcctgtgctgcagttaaacctcgccaatgcgtacctccagggaggccagccgaaagcggcggaaaccattctgaatcgctacacctttagccataaagatgacggtaacggctgggatctgcttgctcaggccgaagccgcgctgaacaaccgcgatcaggagctggcggcgcgcgctgaaagttatgcgctggcgggacgactggatcaggcaatttcactgctcagtagcgccagcgcccaggcaaaactgggtagtcagcaacaggcgcgttacgatgcgcgtatcgaccagttgcgccagttacaggaacgcttcaagccatacacgaaaatgtaatcgccgtttattagccggatggcgtcacaaggagaactcatgaccgacacgattaaaatctaccataacccgcgctgctcgaagagccgcgacacgctgaacctgctgaaatctaacggcgtggaaccggaagtggtgctttatctggatacgcccgccgatgccgccaccgtgcgggaactgctgcgtatgttgggcatgtccagcgcgcgcgaactgatgcgccagaaagaagatctctataaaacgcttcacctggcggatagtgagctgagtgaagaggcgttaatccaggcgctggttgaacaccctaaactgatggagcgccccattgtggtggcaaatggtcaggcgcgcattggccgaccgcctgagcaggtgctggacatcctcggttaaccgttgaacgccgccgtcgcggcgtattacagtttcaggatctctttgacaaacgggatcgtcagttttcgctgggcagtgatcgacgcatgatcgagctgatccagcgtcataaacagcgtgcgcatttcgcgatcaagacgtttgagtaaaaaccgcccgacatcttccggcagttcaaacccccgtaaccgggcgcgcaactgtagcgcctgaagtttgtcttcatcggaaagaggctggagtttatagatttgcccccagtccagacgggaagcgagatcgggcaagcccagatttaactgtcttggcggacgatcgccggtgatcaataaccgcgtcttaccggactccagaatgcggttatagagatcaaagatcgccatctcccacagttcatcgccagcgacacactcaatgttatcaatacacaccagcgagaggtgttccataccgtcgagcacttccggcacgaaccaggtacgtttatcgagcgggacgtagcctaccgcatctccacgctgcgacagttcagcacaggcggcgtgcagtaaatggctgcggcccgcgccttcacgcgcccaaaggtagatatatccactatgttcctggcgcaacacgttttgtaacgcggccagtagagaggcgttatcccccggccagaaacttgcgaaagtttcgtcgtcaggaagataaagtggcaaagagagctgtgccggtgtgttcagagatacctcaacccaggatgacataaaatcgcgctgagtttaccacataattcccgtgagatagaaccgggcagcatcgctgcccggcaacccgttactgatgcgggggctccgcatcatttgcctccagtaccacttcttccggacgcaacaggctaatcagtttaaaaatcaggctcaggcaaatcccgacgatggtcgccagcgccatccctttcaattctgccgcgccgatatgcactttcgcgccgctcacgccgatgatcaaaatcaccgaggtgaggatcaggttttgcgctttgttgtagtcgactttcgattcgatcaagacgcgaatccccgacgcgccgataacgccgtacaacagcagcgagacgccgcccatcacgggtaacgggataatctgaatcgccgccgccagtttgccaacgcaggaaagcagaatggcgaaaatcgccgcgccgccgataacccaggtactgtaaacgcgggtgatcgccatgacgccaatattttccccataggtggtattcggcgtggagccgaagaaaccggaaatgatcgtcgacagtccgttagcgaacatcgagcggtgcaaaccgggatcgcgcactaaatcttttttgacgatattcgccgtcaccaccagatgaccgacatgctcggcgatcacgaccaacgccgcgggcagaatcgtcaggatcgcgaaccattcaaaacgcggcgtatagaaggtcggcagcgcaaaccagtgcgcctgggcaatcggcgtggtatcgaccacccccagcgcgaatgacagcgcatagcccgccagcacgccgatcaaaatcggaatgatcgccaggaaaccgcgaaacagtacggagccgaacaccgtcaccgccagcgtgaccatggagatgataattgttttcgtgtccggcgactgcccttgcgcaggcagtaatccggccatccccgccgcgacgccagccagctccagaccgatgacggcaacgattgcgcccattgccgcaggcgggaacatcacatccagccagccggtgcccgcttttttaacgatgaaagagaccagacagaacaacacgccgcacataataaaaccgcccagcgccacttcataacccagcggcaacaacagtaataccggggaaataaaggcaaagctcgatccgaggtaggcaggaattttacctttgcagataaagagatacagcaacgttccgataccgttaaacagcagcaccgtcgcgggattgatatgaaacagaactggcaccagcacggtcgcgccaaacatggcgaaaaggtgctgtaaactaagcgggattgtctgtaaaagcggcggtctttcactcaccccgatagcacggcgcgtcatagtgttttcctctaagtgtgtttgttatgagtggttttattcaaaaaaaagccgactcttaaagtcggcttttaattatttattcacttatttggtaccaaaaatcttatcgccggcatcgccaagccccggaataatgtatccgtgctcgttaagcccctgatcgatagaggcggtgtacagttcaacgtccgggtgcgctttttccagcgccgcaatgccttccggcgcggcgaccagcaccagcaccttaatgctgctacagcctgcttttttcagcaggtcgatggtcgcgatgacagaaccgccagtcgccagcatcgggtcgacgatcagcgccatgcgctcatcaatgttcgataccagtttctggaaataaggtactggctcaagcgtctcttcgttacggtacatcccgactacgctgatacgcgcgctcggtacattttccagaacgccttccatcatacccagacccgcgcgcagaatcggcacaacggtaatttttttacctttgatctggtcgatttccaccgggccattccagccttcgatggtgactttttccgtttccaggtcggctgtcgcttcatacgtcagcaggctgcctacttctgaggcgagttcacgaaagcgtttagtgctaatgtcgttttcacgcatcagacccagcttgtgtttgacgagtgggtgtttgacttccacgatcttcatactcttctcctatcctcagatgactggcaaccacaaaaaaaatcgccggattataccgcttttcctctctgacgcaacacaatgtatgcttgacctggatcaaccaaaagcgctgatagcggaaaagtgagtataaatcactcacgttgaaacaggcgataaaggctaacaaccgtttgaatattagcaattttaagggtgaatgacctgtcccgaccgcctgtcgtaaaccaagtgctggatatccttttcttttttaccaacagggaaattttcaagcagcgaccgaaaccatgcaaaaaaaatcgcccggataaccagggcgcagaccacgctcgcaaacgtttgctttccctgttagaattgcgccgaatttaacttttaccgcaagaaaaaacgtggggaaccaggcagtgaccgataagacctctcttagctataaagatgccggcgtcgatattgatgcgggtaacgctctggttgatcgaatcaaaggcgtagtgaagaaaactcgccgcccggaggttatgggcggtctgggcggtttcggtgcgctgtgcgcgttgccgcaaaaatatcgtgaaccggtactggtttccggcactgacggcgtaggtaccaaacttcgcctggcgatggacttaaagcgtcacgacgctatcggtattgatctggtggcaatgtgcgtaaacgatctggtcgttcagggcgcggaaccgctgtttttcctcgattactatgccacgggtaaactggatgtcgataccgccgccagcgtgatcaacggtattgccgaaggctgcctgcaatccggctgcgcgctggtcggcggcgagacggcggaaatgccgggcatgtatcacggcgaagattacgatgtggcgggtttctgcgtcggcgtagtcgaaaaatcagaaatcatcgacggctcccgggttgccgaaggcgacgtgctgattgcactcggctccagcggcccgcactcgaatggatattcgctggtgcggaaaattattgacgttagcggctgcgacccacaaaccactctgctggaagggaagccgctggccgatcatctgcttgaaccgacccgtatctacgtaaaatcggttctggaactgattgaaaacgtcgatgtacacgctatcgcccacctcaccggcgggggcttttgggaaaatattccgcgcgttctgccggagaatacccaggcggtaattaatgagtcgtcctggcagtggcccgccatctttacctggctgcaaaccgccggtaatgtcagccgacatgaaatgtaccgtacctttaactgcggcgtcggcatggtgattgcgctctccgctccggaagcggacaaagcgcttgctctgctaaacgagaaaggtgaaaacgcatggaaaatcggtatcatcaaagcctctgattccgaacagcgtgtggttattgaataatgaatattgtggtgctgatttccggcaatggaagcaatttacaggcgattatcgatgcctgcgaagcgaagaaaattaaaggcaccctcagggcagtattcagcaataaggccgacgcgttcggccttgaacgcgccagagaagccggtattccggcgcaagcgctgactgccgatcggtttgacagccgcgacgccttcgatcgcgagctgattcgcaagatagacgcgtatgcgcccgatgtggtcgtgctggccggttttatgcgtattctgagtccgatgtttgtcgcgcattactacgggcgtctgctgaacattcacccttccctgctaccaaaatatccggggttgcatacccatcgccaggcgctggaaaacggcgatgaggagcacggtacctcggtacatttcgtgacagacgaactcgacggcggcccggtcattctccaggcgaaggtgccggtttttgccaacgacagcgaagatgatatcaccgcacgcgtacagactcaggaacatgcgatttatccgctggtgattagctggtttgcgcaggggcgtctaaagatgcgcgataacgccgcctggctggacgggcgtcgtctgccgccgcaaggttatgcgtctgacgaataatatgtcatcggacaggactgcgtctgcttgccggatggcggcataaatgcctatccggcctactcttttcccttcctttatgctatcagtttattgtcatatttttctgacgctgttggacattaacgcgtaatgctcgccataattatcaggcagtgtcccgtgaataaaacggagtataggtagtaatgggtcaggaaaagctatatatcgagaaagaactgagctggttagcatttaacgaacgcgtgttacaggaagcagcggataaatccaacccgttgattgagcggatgcggttcctgggaatctattctaataacctcgacgagttctacaaagtgcgtttcgctgaactgaaacgacgtattattatcagcgaagaacagggttcaaattctcattcacgccatttgttaggcaaaattcagtcccgcgtgttgaaagcagaccaggagttcgacggcctgtacaacgaattactgctggaaatggcgcgtaatcaaatctttctgatcaacgagcgtcagctctcggtgaaccaacaaagctggttgcgccactattttaagcactatttgcgccagcatattaccccgattctcattaaccgggagacggatcttgttcagtttttaaaagatgattacacctatctggcggtggagattatccgtggcgacaccatcaactatgcgctgctggagataccgtccgacaaagtcccacgcttcgttaatctgccgccggagacaccgcgcagacgcaagccgatgatcctgctggataatattctgcgctactgcctggatgacatttttaaagggttcttcgactatgacgcgcttaatgcctattcgatgaaaatgacccgcgatgccgaatatgacctggtgcatgagatggaatccagtctgatggagctgatgtcttccagcctgaagcagcgcctgaccgctgagcctgtgcgctttgtctatcaacgcgatatgcccgccgcgctggtcgacgtactgcgggaaaaactgacgatctcccggtatgactcaatcgtacccggcgggcgctaccacaattttaaagactttattaattttccgaatgtcggtaaagccaacctggtcaataaaccgttaccgcggttacgccatctttggtttgataaagagaagtttcgtaacggtttcgacgcgattcgtgaacgtgatgtgctgctctattatccttatcacacctttgaacatgtgctggaactgctgcgtcaggcgtcgtttgacccaagcgtgctggcgatcaaaatcaatatttatcgcgtagcgaaagactcgcgcattattgactcgatgatccatgccgcccataacggcaaaaaagtcaccgtggtggtggagttgcaggcgcgcttcgatgaagaggcaaatattcactgggccaagcggttaaccgaagcgggcgtccatgttattttctctgcgcccgggctgaaaattcacgccaaactctttctcatctcacgaaaagagggtgatgacgtggtgcgttatgcgcatatcggcaccggtaacttcaacgaaaaaacagcgcggctgtataccgattattcgctgctgaccgccgatgcgcgcattaccaatgaagtgcgtcgggtctttaattttattgaaaacccctatcgcccggtcactttcgattatttgatggtttctccacaaaactcacggcgtctgctgtatgagatgatcgatcgtgaaatcgccaatgcccagcaaggcttaccgtcagggattaccttaaagcttaacaacctggttgataaagggttggtcgacaggctatacgccgcgtcgggttcgggcgtccaggtcaatctgctggtacgcggtatgtgttctcttattccgcaactggaaggcattagcgataatattcgtgcgattagcattgtggatcgctatctggaacacgatcgggtttatattttcgaaaacggcggtgataagcaagtttggctctcttcagctgactggatgacgcgtaatattgactaccgtatcgaagtcgctacgcctatcctcgacccgcggcttaaacaacgcgtcctggatatcattgacattctgtttagcgacacggtaaaagcgcgttttatcgataaagaactcagcaaccgctacgtaccgcgcggcaatcgccgtaaagtccaggcgcagctggcaatttatgactacatcaaatcactcgagcaaccagactaacgctatgccaatttacgataaatcccctcgtccgcaggagttcgctgcggtcgatctcggctcaaacagctttcatatggtcattgcccgcgtggttgacggcgcaatgcagattatcgggcgcttaaaacagcgcgtccatctggcggacgggctgggcgcagataacaaactcagcgaagaagccatggaacgggggcttagctgtctgtcgctgtttgctgaacgcttacaaggtttctccccttccagcgtctgtatcgtaggcacccatacgttacgtcaggcgcaaaatgccgctgattttctcaaacgcgcggaaaaggttattccctacccgatagagattatttccggtaacgaagaagcgcgcctgatttttatgggcgtagaacatacgcagccggaaaaaggccgcaagctggtgatcgatatcggcggcgggtcaacagagctggtcattggcgaaaacttcgaacccaggctggttgaaagccgtcgtatgggctgcgtgagcttcgcgcagctctactttcccggcggcgttatcaataaagaaaacttccagcgcgcccgaatggcggcggcgcaaaaactggaaaccttaacctggcagtatcgtattcagggttggaacgtagcgatgggcgcttccggtacgattaaggccgctcatgaagttctcctggcgctgggtgagaaagatggcttcattacgccggagcgcctcgataaactgaagtcagaagtgttgaagcaccgctcctttaatgcgctcagcctgccgggtctgtctgaagaacgaaaagcggtctttgtgccgggcctggcgattctgtgcggcgtttttgatgctctggctatccgcgagcttcgcctttccgacggcgcattgcgcgaaggcgtactgtatgaaatggaaggccgcttccgccatcaggatgttcgcagccgtaccgcaaaaagtctggccaatcaatacaacattgacagagaacaggccagacgcgtgctggaaaccaccatgcagatgtacgagcagtggcaggcccagcagccaaaactggcgcatccgcagcttgaagcgttgcttcgctgggcggcaatgctgcatgaggttggactgaatattaatcacagcggtttacatcgccattcggcttatattctgcaacacagcgatttgcccggctttaatcaggagcagcaaatgatgatggcgacgctggtgcgttaccatcgtaaagccataaaactggatgatatgccccgctttacgctgtttaagaaaaaacagtatctgccgttaattcagctacttcggctgggcgtattactgaacaaccagcggcaggcgaccaccacgccgccgacgctgcggctaacgaccgatgacagccactggacgttatgttttccgcatgactggttcagccagaatgcgctggtactgcttgatctggaaaaagaacagcagtactgggaagcggtaactggctggcgtctcaatattgaggaagaaagctcgccggagatcgccgcgtaaattgtgagccagacgccgcgccgcggcgtctgtctttactgaatctcagataatagctgcggctcgccaattaaatatccctgaagatagtcgatccccaacgagagcactacgcttcgtatttcttcgctctcgacatactccgcgacgacctgcatatttttcattcgcgctaaatgacaaatagaagccacaatctgataatcgagactgtttgacactatattgcgaataaaactgccatcaattttaagaatatcggcgtcaacgtttttcagccgcgcatagctggcgtagccagtaccgaaatcatcaatcgctatctgacagccaaactgctgtagctgtcccagcgtcaactgcgcctgctcagcattggtgagagagttgctttccgttacctcaaaaaccagttgccagggttcaacctgatattgcgtaagcagctgcttaacttctgcagggaaacgagcgcggcataccgatgttggcgacagattaatggcaaaacgatgcgcgggcatatattcccggctggccgccataaaccgcagcgtgttttcaatcacccaaagatcgatagcggaagacaatccaaactcatgcgccacgggtaaaaaattgtccgggttgataacgtcgccgttgtcatccctgagtcgcagtaagatttcatggtaaacgtccccacgaacaccgaaaataggctgcgccatcaggaaaaaatgatcgtgctccaacgcctgttgcaggcgattcatcatcgcaattctgcccttcaaatcgcgctgcaggtgcattgcgccgcgccgctgtaaatcctccggcgcgttagtcgtcaacgaaagatcggaactggtgcttaattcgcccaacagcagataaaggtggctaaccggagaacgcacgcagcaatagctcacgccgacaggcggctgtagcggcagtccatcccagataaaccgaaactgcttaatatgtttatccagcgcttcaatacgctgctgatgcgcctctgtattaagacgcagcaccaggtcgtgccctgacatctggtagacgcactcatttgaggccagcatcggcgtaatccagtgagagagcttttgcttatactggatgcgtagcatgacgccataatttttacccaatagctccaggcccggcacgtgtaaaaaacagatcgtagaccagggcgcattttggagcgcgcggtttaacgcacgtaaattgggaagatgtacaaccgggtcaagataggccagccgccgtgcgcgaccactcactacgcgctgacgcgtggccagtacagacatataattaacaataaaagaaaaaaccagatagctcgaagaggtaatcgctaattgcgtatcataacctgaataccagggcatataacgctgataataatgaatcgacgtaattagcacgacggcccagataattgaaataaacttatagccatagcgcatcgcgccccacagcatgaccggcaataataacgaaagcgtatagttggtactaaatattgaactattatcagtcaatggcatacacagtataaacattagtgtagtcaatacggccagccaaataacgatctcttttttagtggccttgctatcaatctgtagctttaattgctgataatacccccgtaggtgcagcggattgcgaagagtacgaataataaaatagcacaatggcacgccgacaaggttaccgaccagtaacgcctggtaattaatcagcgtgttgatattaaagggcattacccccatcaggctggctttgctttcgtacatgccaacaaaagcggcaaactggtagatgaccagaaataatgttgctgaacaaaatacctgccagaatattcgttgaaacagcaggtgggcgtcgccgtgggaaacattgtttcgccggggggaaaagacacgatagccgccccagcttagcacgatagtaatgataaagtgcatcgtcacggaaagggtttcatacagccctgtctgcgggtatctgcgccagaagatagcaagcacaatgcccggcagtgctgcccagccgaaaaagagcatcaggctaagcataaaagctaacggcaggtaaaaaagaaccacatttccagtgctggtaagcgcataagtatttgcgctacttaaaacaggcagtaaaatcgaagggagaatgagcggtagtccccaccatttatctctgatatttatataagttttatttagtttcatagatgctcagcagaaccccccaatcccaaaggggcgttaacagacaggcatcccacctgactttaaattgatgatgagatatacatcacacgatagtcatcgattgtaattattaaacaaaagtaacatttgatttaagtcaattattacctttctcctgcagcctttattcgcctttttattctttgttatcattaatttattattaatgtaaatactaaaattatcttccataacaatataagataaatcaactgacgcaattttacattaagaggaattgaccatcggttcgcagtatgccttaatgtagagtgaacgcaggcttgttacgttcttcgccttgataatacccttgaagaacccagcctgatcccgcccatatcgctgggccaacgttaaggaaccctttgtgagtcaggccaacagtatgcgaaaacgacatcgatttaacactcgcatgacccgtatcgtactgcttatcagttttctcttcttctttggacgtttcgtctactcttctatcggcgcctggcagcaccatcaggataaaaaagaagcgcaacagtcatcgctttctgtcaccacgccgggacaacgttaagctgttatccgttaaaaagcccgcgcaagaaaaagaagctttagcgttaacgcaaaaagacaatcccactcaatgggttcaggccatgatcagacgcttaaagagcaaccgcgggatatcctgcctgggtgataagatcacatgcgcggttactaagattccctcgaccgaatacaaaacccgatagccttcagcgtggttaaactcccggtagctggcacagccaattttcagcagttcagggcaaccagttctacctacgaggggtaaacctcgtgggacaactccagtaacattaattgcttctaagtacatcagtaattggttgaactataaactgccacctgggatcagattaccaacgttgacaggcaaaactatcaactcattacagctaagctcaacgaataatttaggtcgtttcgttggtcgtaatgtaccctggctcggttgggttatgacattcactacgatttatgatatccagcgtaatattaaagatacatttaatcgtgtggcggttcctaaagatcgcattaagtggacgtacttctaatgagagatattgagaaagaaattatcgattttatcgatcaggaatataacactaaaaagtactttctctgtgggccaaagcgaatcatcacgcttgataccagtattagggatgatcttaaactcgtttttgaagatagtgaagaacttctacaaaagtacttcaagcgttggaatgtagattcagaaggatttgacatactcaactatctgaatccagagtactttggaagtaaagagcctgatccgcgtaagccactaacggttggtatgctcgttgaaagtgctaaagctgggcgttggttatatagttgaagaataaagttactatattttaaataccccttatttgggctgaatcgccacggataacctggacacttctgagtcgttggtagatctttttctttatccgttcacgcttcagtagctggaaaaagctttctgcaaccgcattgtcatgacagttgccacaacggctcatactgccctccagtccgtgcaatttcagccattcatagcgggtgtactgactaccctgatcagactgaaccagcacctgtttttggggatgacgtcgccacacggccatcagaagcgcattcagaacaatatcttttgtcattcgtggttgcattgaccaaccgataactttgcacgagaacaaatcaacgaccacggcaagatacaaccaaccttcgtgggttcgtaattacgtcaaatttgccgtcaggaactgtgcgccacatagaaaattcatgaatgcacataaataaaaaccctctgtaaaaacagagggttaaattcacctttacctgttcatgaaaacacaggaaggattatcggcttattcccactcaatggtagccggcggtttaccgctgatgtcatacaccacacgggaaatcccgttgacttcattgatgatgcggttggaaacgcgaccgaggaagtcatacggcaggtgcgcccagtgtgcggtcataaagtcgatggtttcgacggcacgcagagagacaacccagtcatacttacgaccatcgcccataacgccaacggaacgaaccggcaggaagacggtaaacgcctgactgactttgtcgtacagatccgctttgcgcagctcttcaatgaagatagcgtcagcacggcgcagcaggtcgcagtactctttcttcacttcacccagaacacgaacgccgaggcccggccccgggaacggatggcgatacagcatgtcatacggcaggcccagctccagaccaatcttacgcacttcgtctttgaacagctctttcagcggttcaaccagccccatcttcatctctttcggcaagccgccgacattgtggtgagatttgatgacgtgcgctttaccggttgcagacgccgcagattcgataacgtcagggtaaatggtgccttgcgccagccacttcacgtcttccagtttgagcgcttcttcgtcgaacacttctacaaaaacacgaccgatgatcttacgcttggcttccggatcgttctcgccagccagcgcggacaggaagcgctcttctgccggtacgtgaacgatattcaggccaaaatggtcgccaaacatgtccatcacctgctcggcttcgttgagacgcagcaggccgttgtcgacgaatacacaggtcagatttttaccgatcgcgcggtgcagcagcattgcggtgacggaagaatccacgccaccagagaggccgaggatcactttgtcgtcgcccacctgctcgcgaatgcgcgccacggcgtcgtcgatgatcttcgccggcgtccacaacgcttcacactggcagatatcgcgtacaaaacgctccagcatgcgcataccctggcgggtgtgagtcacttccgggtggaactgtacaccgtagaagcgtttttcttcgttggccataatggcgaacgggcagctctcggtgctggcgacggtcacgaagtcggacggaatcgccgtcactttatcgccgtggctcatccacacgtccagcagcggtttgccgtctgcggtcagggaatcttcaataccgcgaaccagcgcgctgtcggtcaacacttcgacctgcgcataaccaaattcacgctcattagaaccttctacatgaccgccaagctgcatcgccatggtctgcataccatagcaaacgccaaataccggcacgcctgcttcaaagacatactgcggcgcgcgcgggctgttttcttcggtggtgctttccgggccgccggaaagaataatgccgcttgggttgaagtcacgaatttgtgcttctgtcacatcccacgcccacagttcacagtaaacacccagctcacgcacgcggcgcgcaaccagttgagtgtactgagaaccgaagtccagaatgaggatgcgatgcttatgaatgttttccgtcattgacgcttattccgaggcaagtgaaacagattaaataaatcgcccgacacgaaggtcgggcgaagaaaatcaggagcccagacggtagttcggggactctttggtgatggtcacgtcgtgaacgtggctttcctgaatgcccgcaccgctgatacgcacaaactccgctttagtacgcagttcgtcgatggtagcacaaccggtcagccccatacaggagcgcaggccgcccatctgctggtgaatgatctctttcaggcgacctttataggctacgcgaccttcgataccttccggcaccagtttgtcagcggcgttgtcgctctggaagtaacggtcggaggaacctttggacatcgcacccagcgagcccatgccgcggtaagatttgtaagaacggccctggtagagttcgatttcgcccggggattcttccgtacccgccagcatggaacccaccattaccgcgcttgcacctgcggcaatcgctttggctatgtcgccggagaaacggataccgccgtcagcgataaccggaataccggtaccttccagcgcttcaactgcgtcagaaacagcggtgatctgcggaacgcccacgccagtcacgatacgagtggtacagatggaacccgggccaataccgactttcaccgcgctgcaaccggcttccgccagtgcgcgagcgcctgcgcctgtcgcgacgttgccgccgatgatttgcaggtcaggatatttagcacgggtttcacggatacgttgcaacacgccttctgaatgaccgtgagaggagtcgatcagcagtacgtcaacgcctgccgccaccagcgcgtcaacgcgctcttcgttgcccgcgcctgcgccgaccgccgcgccgacacgtaaacggccctgctcatctttgcaggagtttggtttacgttccgctttctggaaatcttttacggtaatcatgccaagcagatggaagttatcatcaacgaccagcgctttttctacgcgtttttcgtgcatttttgccagcacgacttcacgggcttcgccttcacgaacggtcaccagacgctctttcggcgtcatgtaaacgctaaccggctggttcaggtcagtcacaaaacgcacgtcacgaccggtgatgatacccaccagctcgttatcttcagtcaccaccggatagcccgcaaaaccgttacgctcggtcagggctttcacttcatgcaacgtggtggttggcaggacggtctgcgggtcggtcactacgccggactcgtgtttcttcacgcggcgaacttcttccgcctggcgctcaatggacatgtttttgtggataaaaccaatgccgccttcctgggccagggcaattgccaggcgcgcttccgtcacggtgtccatcgccgcagaaagcataggaatattcagacgaatagttttcgtcaactgcgtgctgagatcggcagtattcggcaaaacggtggagtgagcgggaacaaggaggacgtcgtcaaacgtcagggcttctttagcgatacgtagcatgggcaatatctcacctgggaggttaataaatattgccgcggcattatacagaacgtaatcggttgcatctacatttttttgcaaatagtgcttgcgatcccccgtgagcaggttactatcgattgaataacctgctgatttagaatttgatcccgctcacatgttatcctctcaaacttcctcaatttttaccgtaagccgccttaaccagacggttcgtctgctgttagaacaggagatgggacaggtatggatcagcggcgagatttctaatttcacgcagcctgcgtcgggccactggtactttacgctcaaagacgataccgctcaggtgcgctgtgcgatgttccgtaacagcaatcgccgggtgacgttccgcccgcagcacgggcagcaggtgctggtacgcgccaacattacgctgtacgagccgcgcggcgattatcaaatcatcgccgaaagtatgcagcccgcgggcgaaggcttgttgcagcagaaatatgagcagctaaaagccaaactgcaggccgaaggcttgttcgatcagcagcataaacagccgttgccctccccggcccactgcgttggggtgatcacttcgaaaaccggcgcggcgctgcacgatattctccacgtgctaaagcgtcgtgacccatccctgcccgttattatctatccaaccgcagtccagggcgacgacgcgccggggcagatcgttcgtgctatcgaactggcgaacgcgcgcggcgaatgtgatgtactgatcgtcgggcgcggcggcggttcgctggaagatttgtggagttttaacgacgaacgcgtggcgcgggcgatttttgccagccgcattccggtggtcagcgccgtcggtcacgaaacggacgtcacgatagctgattttgtcgccgacctgcgcgcgcctacgccatcagcagcggcagaaattgtcagccgtaaccagcaggagttgttgcgtcagatccagtccgcccagcagcgtctgggcatggcgatggactactacctcgccaatcgcagccgccgtttcacgcagatttttcaccgtctgcaacagcaacatccgcaactgcgtctggcccgtcagcaaaccgcgctggaacgtctacgccaacggatgggatttgcgcttgaggccaggattaagcaggccaatcaacgccaacagtgcgtaagtcaacgcctgagccagcaaaatccgcagccgcgcattcaccgcgcgcagtcgcgcatccaacagcttgaatatcgtctgacggagaatatccgctcacggttaagcgaacagcgcgagcgttttggcaacgcggtcacgcatctggaagcggtcagcccgttagccacgctggcgcgcggctatacggtttcgacgacaacggacggcaaggtgctgaaaaagatcaaacaggtcaaagcaggcgatatcatgaccacgagactggaggacggctggcttgaaagtgaagtcaaatccgtcacgccgggcacgtaatccaacactcccccaccctttgcagcgcgatgttgggtttcgacttcgcctcagccaacctacgcgccacgtcggataaggtgtagccataatctgacgatcaaccggtttgtcattcgcctcaaaaccgggcagggaacacccgcccggttttgtctaacttaccagttatagcgcagattgaggctaccgttcagatcgccaaagtcattgctgccagtctgcccggcaacctgagcgcgaacgctccactgcttatcgatatctgcctgcagacccactttcagctccgcacggttagccggaagatcctgtttcaccgtagcatcatcaaacgataccgacacatcatcgctggtgtgcagccagttagcttcagcaaacggctggataaccgtacggctgcctttgtacagcttgccgtcaacacgcagacccagacgcgttgtccaactgtcgccatcctgaccatcgatccgggtgccgtagttatccttcacgctatccgctgagtaattctgccagacaacctgcgcctgcggcgtcagactgacagtattaccgttgctaagcgcaatatcgtagcgataaccagtttccagcgagacggcgttagcggttgaatcataagattcagatcccgcatcaccgctctctacgctgttgttgtagaaaccatattggtaccagctgtcgacatacgcgccgctatgcgtttgggcatcggcaaaccaggtggcatagacgccaaggttgtagccgtctacgttgccgctactggtgaactggctaccgtctgcgccacggttaccggtgctgtcggtatcggcgttgatgtagctcgccatgacgccaacggtaacgctctgctggccgttaccccaggccagaatgtcgccgcctaactggaactgggagtagttgctgtccatatcgatattgccgctgacagcctcggattccgctttacccgctttgaagcgcgcccatacgctgccatcggcattacgatactggctgccctcgcggtcatagagggtctgcatttgcaggttgcgcgccatccactggttgcccatgtacgcgccgatatccgcacggtactgcggtgcgacatcgccgccgtggtccggaggcgtgacatcgccgccgtcgccgccgtcgtccggaggcgtgacattaccgccatcgccgccgtcgtccggaggcgtgacattaccgccatcgtcaccgccatccgaaggcgtgtcatcaccgccgctgtcgtcatcatcagactgtgcttttgacgccagataccagtcgttgtcactttcattccagtacagacggtaggtatacagaccggcgttaacctcattttttagctcaaacgcatcgctggtcgatacgccgccaacatccaccacttcgataccgttagtggtctgtgctccatcgccgatgccgttgatgtacagatcggtggtgccggaagcatcgccggtaatgaccaacttatcggttgccgaatcatcgtcgcccaggacggtattcaggtaaagcgagccgccgttgccggtgtaattgccatcgacataaagcgtattgccaggcgtgctggagctgctaccactggtcattgtccccatgttgatcagatcgccattgagggtgaagatagcgcctgtttcctcgctgttgccgaagaccagcgtcccttcgttggtcaccttaccgttaacggtcgtaccattgctgccgccgaaggtcgccccggaggcgacgttcaccgcctgctggctgcccatctcgccaatcgagccgtctccggacagccatagcgtgccttcctgtacgttggtatcgccgctataggtgttcgcgccgctcagcgtcagtttacccgcgcccagtttggtcagcgatttaccgtcccagtcgccgttgccggttttatcgcccagtacgctggtgacttcaaaactgtcgcctgcgcccagggtaaacgtgccgtgtgctggcgtcgctgacgtggcggtcgcattccagctcagcccttcggtaagcagatattctgacgcatcttcaggattgattgtcccggttacggtcagatagtccggcttgtcagtgaggttcatcgtcaggctggtaaagtcgccgctgatatcgctggtcatatccatcagtttaaaggactggaactccgcgtcggaggcgcgcgcttgcaggctggcgtcgctgacgaccaaatcgccgccaagcgtggcgctgctgccggtaatcagcggttgcactgagtcactattcagctcaacgttcagcgtactgccatcttgctgaattaacgcgctgtcgccgagatccaacgaggtgccgagcgccagttgggtcgtcgcgccgctatgagtggtgatgccgcccaccgcgctgacttcaccgtctgcgtccagcaccagcgtggcattattgtctaccagaccggtgcccagcgccgtcgtactggcggcgaccagcgtaccttcattgatggtggtgccgccgctgtagtcgttgtcgccagagaggatcagcgtgcctgcgccttctttggtcagcgatttaccgtcccatctgctacccggatccagcgtatcgtcaacgtctgtcagtgtagccgcaacgttaaagctgccgtcagggtcgctcagggtaaaggtgccgtgggcgtcggtagtggcgttgtctctgtccgcataccaggagagggaggccgtcagatcatagtgggtgttgtctgcttcatcgacttttccgtcgatagtcaggaagtcaacatcttctctattcattcccgcgacggtcagatcgtcgaaatcggtcgtaatggcgctgtcgctgccaatcagcgtgtaggtgtatgcctcaggcgtccagctgtctgtaacgctgccaatgccggtaacattcagcgtgccgcccagcgcgacgctgtcggcggtaatcacggcgtcgtcggtggccgcgccgaggtcaatacttagcgtactgccgtcttcctgggtgaactggcccgcgtcaagggtgctgcccgctgccagcgcggtagtggcgccgctatgggtggtgacgttcgcaagctcaaatgcgccgttggcatccagtatcagcgtaccgctgttgtcgatattgccgctgcccagcgcgttgacgttggcggcaatcagcgtgccgtcagtgatagtggtggcgccggaatagctgttgtcgccgcctaacgtcagctcgccggtaccggttttgaccagcgaaccgctgccggaaagcgtattttccagctcgccctcaccgacctgaagcacaccgctgttggcaacagctccggtacccagcgaatccgcatggtcagccgtcagcgtaccgccgataatggtggtgccgccggagtaactgttatcgccgcttaacgtcagttcgcccgtaccggttttgaccagcgaaccgctgccggaaagcgtattttccagctcgccctcgccgacctgaagcacaccgctgttggcaacagctccggtacccagcgaatccgcatggtcagccgtcagcgtaccgccgataatggtggtgccgccggagtaactgttatcgccgcttaacgtcagttcgcccgtaccggttttgaccagcgaaccgctgccggaaagcgtattttccagctcgccctcgccgacctgaagcacgccgctgttggcaacagctccggtacccagcgaatccgcatggtcagccgtcagcgtaccgccgataatggtggtgccgccggagtaatcgttgccgccgcttaacgtcagctcgccggtaccggttttcaccagcgaaccgctgccggaaagcgtattttccagatcgccttcgcccaccttaagcacgccgctgttatcgatatcgccgctgcccagcgaatccgcatggtcagccgtcagcgtaccgccggtaatggtggtgccgccggagtaagtgttgtcgccgcttagcgtcagctcgcctgtgccggttttcaccagcgagccgctgccggaaaggatgttttccagctcgccttcgcccaccttaagcacgccgctgttgtcgatatcgccgctgcccagcgaatccgcatggtcagccgtcagcgtaccgccggaaatagtggtgccgccgctgtagttgttatcgccggtcacgatcagctcatcgctaccgcttttgacaatttggccctcgccggtcacgttgttatccagcgtgccctggctcagcgcaagcgttgcgctttctgcaatcgtcacatcgccagtgccgagcgcggcggcgtctttggcggccagaatgccgccgtcaatttcagtatcgccgtagtcgttgccggtgttgctgaggatcagcgtgccgtcgccttgtttggttagcttgctgccgttccagttggaggtcgccgtggtttcgtccagttcgctggtgacggtaaaggtactgcctgcatcaacggtaaaagtgccatgcgcagcgcgcgcagaatttgcgcccgcgtaccaactcaagcccgtagacaactcgtagttggtattatcattcgcatcaacgcccgcgttgatcgtcagataatccggcatagcggaggtgtcagcatccagtgttacgctgtcaaaatcggtagtgattgcagtttgcgaatcaatcagcgtgatcgatccaaagtgttcgtcggtttcgggcgcgacaaaggtggccgttgagctaaggttcagcgtcccgtccagcgtgacgttggcggctttgataattggcgcgctgttggcggtatccagcgtcgcgtttatctggctgccgtcctgcaaggtcagggtattgtccaccgtcagcagcgtacctgtcgaaccgctcgcgttgcccagcgtaatatcgccgtcgttggtcagattgccgacggttgacgggtcggtcatgttccactggctggtgtcgtcgagcgacagcgtagtaaacatcgcatctacactaccggttaacgtggacccctggcttaaagagagcgatgacgatgacgcgtcagtctggacaatgttgccggtcagcatcgttttttcggcctgaatagtcgctttgctgcctaatttgatcgcggtcggcgccgtaaaggtgctgttggtgagctcaatggggtcgttaatggtcgtgctgccatcaatgttcagtgcgacagtttttgaggtgacgtttgcgtcgctgaccgtcagcgcgttgagatcctcatacccgtcgagttttcttttgctggttataaagataccgtcgccgtcggcgttgatggtggcgccgtcgatcctggcgtccgacgccagaatatacacgcccgtaccggcagaggtaatgttgccgcctgtaatatccagggtagtggcgttattggcctgtaccgccgcgccgctggcattggtatgtgttatggtcgcgttggtgagattaagagcggccttattggtaccctggatggtgctcatcgtacctgcagagctgaccgagctatcagacaggttcagggtggaaccctcgtctgtcgcggtgtttccggcaacaacgtttatctggccttgcgccagggtgattgtgctaccgtccagcacgttcagcgtactgccttgttgcacctgcgcgctgctgctgttagctgcctcaacgatggtaccgtccagcgttgcttctgaacccgtatacaacgtcattacgccgaaattgccgtcaatcgttagcgtactgtctgttaacctcagtgtgctgccatccgctgcggaaataccctgggtataaatacccgtagtggttatcttcgcgtcggtaagctcaaggatagcgtaatgatccagcgaaatggcgttggaaacatacttaccgccatccggatcatcagccccgcctccgcttgtttcaatgacgagccccgtccctgtgaccgtggtgggctgccagccgacggtggcgacacccgagacatatagcgccgcgccttcatcggtgcccgaatagcttatcggcggcgttgacgcatccagaacgtggggctgcgcatcagcatatgatacctgattatcggccatagccagcgggctgaaaaatccgagcgccgcagccacggcgcaagccagcgccgcgcgcgttgcttttattatttgtccatattcggacttttggtttggagaatgggtttcactcgcgcatacttgcgctttaactttgctgtggcctcacgccagttctgaagccacgacatacatatttcgcacggcgctccagacaatactgtaagtcctgttcaatttttaaatttccctttaataacgttcacgaagcaaactggattttgattgggctgcaaatagcctttaaatgctacattatcaatgagttaaataataaataacaaaaatacagctctatgaatggttgcaatcacctgaaacaatatattatccaagccaaattattaactaatttcaaggcttatttcaatgccaggtcaatttctggttgatttataattgatataaatacattcatccatttaataaatatttatatcgtgaataacatttaataacttcatatattgaaataaataaatgcgtgaaacaaaaaggtgtgattatcatgcgacacctggcgttattttaaatatactcgtcatacttcaagttgcatgtgctgcggctgcgttccctcaccccagtcacttactttagtaagctcccggggattcgctcgcttgccgccttcctgcaactcgaattatttagagtatatacgtagcgccagatgccgggttgcagaagggagacggcgcttttacacacgcgtggcaaacggtggtgacgccaattagcagaacatatacttttcaatgaatgctactttcactttttcatgaagctcaattgaacgtgaaaagcagattattttcgtgccagacgcataatacgttactccacgcacgtcgcataacccgctgagcctgccggcttaatggcgcagttttgactcttggtattctcatctacgccgcaatacatgccgccgcttgaggttgatttagataaatagggatagccctgcgtcggccagcctaacgagctaattgaatgatacagcgtcaacaggtcgttattatccggtgctttgctaaggctaccgcactgtttggcaatatcccatttcgtgttgtccaccgtatgcgccatcgcccagtactcgttatttgcatgcactccgttggtaaatactggcgttacgcctgacagcatctcagcctgaagccacggacgatgcagcgtttttccgttgacggatgtcgtatccgacatatttccccagaacaacgctttatccgtatccgggctggtaagtaccataaaaatcacatccagcgatgcgtgaagagtcgtattgtccgtcactttcaccgtgagtggcgttttcaaccccaggcttttatcctgattaagcgtaaacgttgccgtaccgtcgctgccggtagtgccggtaaagacaatcccggtggtggtcatactttggctggcgcttgcgggagtcagctctttaagcatgagatcgtctgctccggcatccgctgccacgtcgccatccgttatcaccatacctgcccgatttttcgaatcgccacgtgacaacgtaaaaccgacgttggcgaccgggttaccgctgctatcttttaccgtcaccgttaacggcatcgcgcttcccttcgccactaccgccgcatttttcgcgctgtccatcgccgtcgaggtcagcgtaatactggcaggagtagaagtacgcggctcgaccagacacacctgagcgccggtggcagtcgatgaactggcggtgcccttaccgccgctattcaggtttataaattggtaatatccggtattcggcgcacgatccgccgcccaccaggatttgttccccgccaccggccagccgtaatttgtaccgattgcgccgttaggattgtcgctatacaacgtttgcagatcgcccgacaacggctggtattccgcatcacagccggttgcgcccgctttttcagtgttcgctgcggtgactaagggccatgtttcattgttaaccaggtaagtaccgctattcgacgtcatctccgccgccagcagcggacgccggaacttcacgcccgcgctgttggttacggtttccggcatgtgtccccagtatttagctttatcactgtccgggctggtaatgacggtgaaaatgacgtccatatcgctaactgtcagcggatcgtcgacaagcatcgcctgtagcggtgttctcaggccacgggaatcatcctgcgtcacttcgagttgcgctttaccatcctcatccgtaatgccataccaataacttgtgcacgaagataccgtgcagttaaacgtcattgagcccgtagacggcgcaaccgatgtgagtacctgcctccgccggaactgccatcaacgacacccgcccggtctatcgaaagcgttcgtcccaaacggatagcggtattgggctgcggcgtgccggaaccatccctcacagtgacggtcaacggcaggctctcgcccttcttcgccactggagcgcctttatccgcatccatgtcgctggaggtgagttctatcgacaagtcccggcgctttgccagacaaagctgcgccgtggcggtattggctttggttgtcagcgtattattatcgctgagtctgacatactgaaactgactgtctgagtgcgtggcatccggtactgagttacccgccccccaatattttcctgatgccaccggtaggccaagcgttgtcgtgagtgcgccattgggataatcggtatatagcgtctgtaaatcatttaccgtcggcaaccccagccgatcgcacgggctggcggtgtcctgatacatattcggataacggctccaggtataccaggtctcgttattttccgtataacccgacgtgtccgccgttgaagaaagttcagcgcgcagcagcggtcgcttaaattcaacccccttactgttggtaaaggtttccggcatatggccccagtatttggccttatcgctgtccgggctggtcactacggtaaagattgcgtctttgctgtctgtcaggttgctgccgtccatcgtggcggcgctgatagtggtttttaaaccggcggtactgtcctgcgcaagggtaaatgtcacctgtccctgggcatcagtttgcgcatacagatatttcgccgaggtatccagcaggtatgtcgccaggccggacggcatcacattacgcagcgtaatatcgtctgtgatgcttgaggacgatgtggcgctgttggcgcgattgtacgaagatccgcggctgattttcaccatcacgtttttcatcggctgacctgcggcgtctttcacgtcgatggtggcggccatctgctcgcccttcttcgcctttgcgcttccggtggtttcatcctggcctgccagcgtcagcgtcaggctggcggcggcgctgcgcggcgaggcaagacaggtctgcatgtagtacatcgaggtgctggtcgtcgttttgacatcattgccgtcgttaaacaggttgaccgccgcatagagcgacttcgtgccgtctgacgatatcacgtaatcccccgcccaccagtagcggctgacgttgttgttgcctgaactggtcatcggccagccgttacggctgcgcatggcgttatccgggtatgtcccgtacagtgtctggaggttggctacggtcggtagcgtgtcgcgcccacagccgccaccggtgccgttccaggctttatcgacggttatcatgccccaggtttcgcctttgtcgtagtagccgttggcgatggtcagcgttttgccgggcgtagcgctaaactcgctggccagcagcggacgcctgtacgccacgccgctgctgtcggtcagcgtttccgccatatggccccagtagttggccttcggcgtgtccggactggtgaccacggtaaagatgaccggcagcggcgcgctcgttacgccgttgtgttctatcgccgccgtcagcggcgttttaaagcccgcgccgctgtcctggctgatattcagcgtcagtgtgccgtcggcgcccgtggcggtgtaatagttagcgccgctgctacgcccgtcgctgtggtttatctgtatatccgccgccgccgagctattcacctcctgattcgcgcgcccgacgctgtcgccgcgcgtaaagataaccggcgtgtcggcggccgggttgccctgggcatcccgcgtggtgatgatgaccgggatggtctcgccgactttcgctttggcgaatccgtcgctgtcgttatacacaggcgaagtgagcgttatctgcgtcgccgccggatgggcgttttgcaggcagacaaaatagagttgttcattccacaatagcgaaccgacgccgccgtcgcgcagattaatcgacttaacgtagcggttttgcgtactccggctcaaatcggcggtgctgtcctggtagtttttaccgtccagcggccagccctgctgcgtattcatggcgccgccgggcctggcgtcgtacagcgattgcatatcggcaagggtcggcacgtatcccgcgccgcaggcgtcgttcgccatttcaaaatcgacgattccccacgcttcgttgttttccgtattgtcgccgtgggtaacgccgctggcgatttcagccgataacagcgggcgcttaaacacctcgccgttggccgccgtcgtcgtttccggcatatggccccacattttggctttgtcgctgtccgggctggtgaccacggtgaaaatagtgtcgatgctggccgtcgcgctggcgttgtcgtacagcgccgccgtaatcgcgactttcgtcccgtgggtgtccgggcgggtgacgttgatgattttgctgccgttttcaccggtcatgccgccgattttggtggcggtgtcgttgagcgaatcgccgtcgatcaccaccgccgagacgatgccgtcgccgctaccggcgatatgtttctccccctggcgggtatagccgtcgccgcggcttaacacgaacggcgcttgcggcagcggattgccgctggcgtcttttaccgtcactttaagctggagcgtatcgccctttttcaccttcaccgcgtgttcgctgtttgcgttataccacaatgccgcatccaccggctcaatggtgatagacgccgccgtcggatttttgctgaccagacagctcacgtagtccgacgcatcgccggaagcggtatagccgcccgcagccagtgataccgcctgccatgtagcggcgctggcgaaggtggatgaccagtagtcatactcagtcggccagccggatacggtgtggattttattgccgtcgctggaggcatacagtgcggcaagctgatcggcgcgcggcagatggccggcctcgcagcccccggcgttggggttattcagcgcgtcggcgtggctgacacgcgcccaggtttcgttatcctgctcctgggtacgggtggcggcagtcgcttccgccgccagctttggccgctggaatttcatatcacccacggtgagcgtgtccgccatatgaccccacatctgcgcctccggcgtatcggggctggtggcaacggtaaatttcacgctgcggttgacgggcgtggtaatcagtgagttgaccggcagtacgctcagcggcgtcagcaagcccacgccctgcggctgttcaatcaccagcgtggcgttgccctcggcatcggtcatgccctggtacgtcatcgacgcctgggaagagccgaaaggcgttccgcccatcaccagcgttccgtcgctgggatcggtaaagcccgtggtggcgttgtcgcgatttttgccgtgcgacatggtgacggtaaagctggcgttaggcacgcttaacccattcagcgcattgacggaatggacgttcatcgtgatttgttcgccgactttggctaccgcattgcgtaacgactcatcgccattaaagtaaacgtccagactggtcaccaactcattgccggagcaggagagatagttcggttcggtgccgctgaacgtgctgtccgcaccggtcgccaggttgacgtgcgcggtggtggaaccatcagtatccgccgcgatatagctgtgtttctgcgtcggccagccgtaggtcgtttccatcgcgttgccggaatgggcctgatacagcgtatccagcaacagttgccccggcacctggccggtaccgcactggttcgtcgccgccgttaccgagttaaacgtcgcccagtattcgttattctcaaattcggaaccggtatcctgcgcggcttcgtccgccagcagcgggcgtttgtagatattgcccgcttccaccacgccctgcatatggccccacatgcgcgcctgcgccacgtccgggctggtgacgacggtaaaaatcacgttctgcgtcgcttccgtgccgtcgaacagcaccacgcgcaccggggttaatacgcccgcccccttgtcctgagtcaacaccagcgagaactgaccgttggcgtcggtgacgccgtgatagtgaccgtcgctgccttccagattggtgataattaccggatcatccgtccactgatgcccgctatcaatatcggcgttcttttgattctggcgattttgctcgtcgcccaggtagacgttaaagtagcgataaggcagcggtttattggtggcgctgtcggtgacggtgatcttcatgttgatctcttcgcccaccttcactttcgccgcgttgaccgttgaatcaaaattatcggcgctaatcactaatttcggcgtgaccgcaggcggggctttatccacgcagctaaccagcgattgcgtggcgtccggcatctgcgtaagggcgcggctgcgcatatcaatgctgatatggtcagtggcagtcgatccctgggaggaggaccagtactcttcgtcaccggatgtcagccctaccggccagccgagggtggtggccagatcgccgcgcgcaatttttaacccttccagttggcgtgcatccggcagaatatcgcagtgcgcgtcggcgtggccccagttgaactgcgcccaggtttcattgttgatgctggcggtgcggtcttcactgtcggtttccgccgccagtttggggcggtaaaaggtgtagcttgcgccgtccaccgtggcggtggacgtctctgccatatgaccgtacatgttggcgctgctgctgtccgggctggtgagggtggtaaaaatcacgtccacgctggctttcagcgctggcgcgctcgacgggtgcgctatcagcggcgttttaacgcccgggccgttcgcctgggtgacgaccacggtcgccacgccctcggcgttggtcgtaccgtgatattccgtggcggtggtggtcagttcggtgttgccgacgcgcaccggcgcggcattgtttaccacgccctggcggttttgcgcgtcgccgcgggtaatcacgaaatcaacgttgccctccggttcgccgccgcagtctttggtcgttaccgtcagcatgatgctttcgcccgctttgaccttcgcggcgttgagcgactcatccagatgatcggcggcgagcgttaccgggtcgcccacggcgggcgcgatatccacggcaaacttttgatcaagcacttcgaccgccgtgttataaggcacgccggtgcgggtaagcaaccacagcggcggtatggcggttgaggtatccagttgcgaccagaccaccagatggcggcccgccagattctgcgcgcagaaacttatattgctgacgggttgtggatcaagcggcgtgtccggcgtggcggcgtcggcccacaccagcgtaacggcgggcgcgcgttcagcctgccaggccagcggcggcacggcgaagatatcgccttcggtgtcgtgcggattggttaaggtcagcgcgctgccgacatcactggtgctgaactggctgggcttcgcggagtagtcaacaggattcgccgcatcagagcgcaactgcacgctgccctgatataccgggatcgttacactgtcggcctgaggcggagtgccattaatagccgcagtttgctcagtgagttcctgccatgcgccgctgcttcgcacggcctgcgcgaagaaaggcgttaaactgagggcgcatagcagcagccagggtaaaaaaccgacacactttttcgatttcactgacgtacctgagaaaagtccatttcgttgcagttcattccatgaatacaaaaacgtaaaaatacatcgctaccggaacagcgccagctacaagggatacccaggttgggcgccgcaaagcgtcacccaacattcaaacgcgctcccggccccattccccattcactacggcacccggcacgagcctaagcccgaggtcgtcgctttttcacgagtacaggttgtctggccggtcgtttcgttaaatgaacagtagtacttattgctttgaccttcatcttgcgacacatagtcccaggatgatgtcgtcggccattgcaacgtgccgataacgctctgcaacgctttcagatcgtccagcgaggctatattttcctgcgatccgcaaagatgcgtcaacgacgtttccacgtgttcggactgataataatagttcgtcccccagaattcattattaaacggccaggtatcccggggcgcggcagagagctcggctttcaggtacgggcggcgcagcgtaacgccgttcacctgcacggtatccggcatatgaccccagtatgacgcatacggcgtatccgggctggtttgtaccgtaaagattgcatctacgctcgccgcctcatcaaattgattcgcaaacgccgccgtgacagacgtttttaaccccagcgatttatcctgagttaacgtaaaccgcaacttaccgtcatcgccggtgaagccagaccattttgtgctgaggccattctggttattaaacgccactgccgtacccgcaggtgcaaccggcgccagcatcatattcgccggcgaagttgtaaacggaaccggctcgccaatcacgcctggttcaatgtattgcttatccaccgcaccgcgcgaataagcgtaatcacgcgtcaacagtacggccaccccggcctgcggctgcccggcgtcgttagtcaccgttaccgtcatcggtatcgtttcgccttttttcgccacggccgccgatttatcggcgttccatgcgtcggaagagagcgcgatattcagcccgctgcgcgatgttgtcaggcagagttgtaagtagtagttacccgggttttccgacatgctgtagtttttccccgtcttgagatctttatactgccagtaaagggttgagcctttcagcaggctatcccccgcccaccaccgcttcccgacgggcaatccaatatcggtcgccaccttgccgcttgggtgatcgttgtacagcgcagtgaaatcatctatcgcagccatctggttcatcggacatccgccgtaattaccggtattaaaactattcaccatgatccagttttcattggtttcgaaataggtatccgtgtgcgcctccgatgagggctcgcctgccaccagcgggcgcttaaactccgcaccgttgctggcggtgaaggtctccggcatatggccgtacatgttggccttgtcgctgtccgggctggtgaggacggtgaacaccaccggcagcgatgaggtcgccgtcggcgtatcgttcagattcgcggtcagctggtttttcaaccctatgccgccgggttcggcaagcgtcagggccagcgtaccatccgcgccggtggcgccggtcagaaccgatgtggcatagtaaaactgttgctgcgcaccggtgagcggcgtcaccgtcatgttggtgccgttagtggctacaaatttattatagtcagggttgcgcgccttcccggcgtcacgtttaagcgaaaaagtcgcataaggcaccgggttgcccatcgcatcggtagtggtgatgagtagcgggatcgactcgctgtttttcgccttcaccgcctgaatagcgtcatccatcgcctgcggggaggtgagggtaatctgcgtggcctgcggcagcggcgtcgtggcgcaaatttgatactgccaggcagtgctggtcgcgctgttttctgaccgacgcgaaccatcagccagatcgactgcgtaatagaagtcaagttttgccccgctggaaaatgacgtcgagttcgatccgctccagtaagaatagtagaccggccagccctgggcggtatttatcgttcggctcgggtatttgctgtagagcgaatccagcgcctcaacggcagggtaatagcccgccgcgcaacgggccggattggccccttcactggctggcccatgaaaaaccgcccaggtttcgttggtttcttgcttagacgcagtattgtccgtactggacagctcagcgtacagcagcgggcgctggtacaccgcgccatccgccgccgtcagcgatggcgccatatgcccccacatgcgggcaacgctgacatccgggctggtgacgacggtaaagatagtgtcgatgctggcactcacggcggcattttcatacagcgtcgcgttaatcgcggtgcgggtgccgtgggtgtccgggcgggtgacgctgatgatacgggtgccgtcagtgccggtctgcgaccccattttggtggtggtccatgccagcgattcgccgtcgatcaccacgggcgtcacgatgccttgcagatcgtcaccgtcctgagcggtatacttttcgccccggcgatcgtaaccgtcgccgcgggtgagcacaaacggcgcttccgggatcgggttgccgctgacgtccttcaccgtcaccttgagctgcatcgtctcgccctttttcactttgaccgcgtggacgtcgctgccgtcgtaccactgcgacggattgaccggttcaatggtgatggacgccgccaccgggttatcgctggccaggcagctggcgtaaatcgagacgttgctgttggcaaattcactgccgttcgtcagcgcgatcagtttccaggtggtggcgctctggtaggtggacgaccagtagttaagataggtcggccagccctgaatgctgtgaatcttgccgccgctgttggcgttatacagcgcctcaagctggtcgatgcgcggcaggcggttcgccgcgcagccgcccgcatccgggttgcccaccgcgtcgctatgggccacgcgcgcccaggtctcattgctctcgtcctgggtacgcagcgggttgctcacttcacccgccagtttgggccgctcaaaggtccagtcgcccacggtaatcgtgtcggccatatggccccacattttggccgctggcgtatccgggctggtggcgacggtaaacttcacgctgcgggaaaccggcgtgctgattaatgaatcgacgggcgcaatatttaacggcgtcagcagccccacgccctttttctgggtgaggataatggtcgcatcgccgttagcgtcggtgatcccgtgataaacctgcccggcaacgtagcccacgtcgtcaaactgcatctcgccgttgctggtatcggtaaagccggtcgtcagcccgtcacgccgcctgccgttcgccatggtgatggtgaagtcggtattgccgatcgccatgccgttaagggcgttgcgcgaatggatgttcatcttaacctgttcacccactttggcgtcggcgtttttgatcaccgggtcgtcgttgaagtagacgtccagcaccgccaccatttcattggccgagcaggtcaggtagttgggcgtatcggtaaatttgccgctatcgccgttttcgaggttgacgtgtaccgtcccggaggcgtcgctgtcggcggcgatgaaataatcttcagtcggccagccgtgctcgctttccatctgtccgcccgcatgttcgctgtacaaatgcgccagcgacgactgatccggcacctggccgacaccgcactgcgcggtggccgacgccacggagttaaacgtcgcccactcttcgttattttcgctgaattggccgtctttatggctggcctccaccgccagcagcggacgtttgtacaggttgcccgcgtccaccacgccgcgcatatggccccacatgttggcgccgtccacgtccgggctggtgaccacggtgaaaattacgctaaaggacagctcgacgttgccgccttcgtcgtccggcatcacgatgcggatgggcgtttcgacgcccaggccgctgttatgttttaacgtcaggtgcgcctggccgttgacgtcagtcacgccggtatagtgctccggcgacgaggcgctcataccttcggaatcaacggtgacccgcaggttatcccatgcgtcctgatgttcccctttgcggtttttcgccgggtcgataaacagctccatgtagcggtaaggcagcggtttttgcgtgtcccggtcaactacggtcatcgtcagatcaatcgactcccccacctgcgctttatacggtccttgtggggagagagtaatctgcgggtgcgccgcaggctgggctttatccacacaactgaccagcagcgtgtcgctgtcggcggccctgacgaccgatgcgctgttcatatgtacggcagcgtggtagccgctcagttggtttttggtcgatgaccaatattcagcatcgcccgccaccggccagccggtccaggtttccagcgtgctgtgctcatgtcgcatctgcaccagctgttcggcgtccggcagaatgtcacagtggttatccgcgccgctccaggtaaacagcgcccaggtttcgttggtatcgacgacgcttttgtcagcgccgctcgcttccgccgccagcttcgggcgggtgaaggtgtaggttataccgttcagcgtcgcggtagcgctctctatcatgtggccgtacatactggccttatcgctgtccgggctggtgatggtggtgaaaatgacggcggtttcagccgtaagcgccggaaagttgaccgagctgacaaccagcggcgttttgacgccggggccttccttctgggtgaccaccaccgtggcgttgccgttggcgtcagtgacgccgcgatattccgtttgggtggtcgtgagctcggtatcgccaacgcgaaccgggttggcgttattgaccacaccctggcggttttccgcatctttacggcggatgacaaacggcgcgttgccttcgggcgtgccgtcgcacgctttggtggagatggtgagggtgatgctttcccccaccttcacttttgatgcctcaaaggccgaatcaacgtgatcgccgctgactgtaaccggcgtgtcggtggccggtttaatgttgagcgccactttcgggcttaacagcggaatggtcgcataattcggcaccccggtacgcgtaaagagccacagcgcgggaacgttggtttcatcttccacctgcgcccaggccaccagctgtcgcccggcgaggttttgggcgcaaaaggtcaggttcggaaccggctgcggcgagagcggcgtgtcgggcgtggcggcatcggcccataccaggcccatggcgggcggctggcggttttcccaggcgatggtgggcggatcgctaaagagatcgccttcggtatcggtggaattgaccgcccgcatcgaggttgaggtagcatccgcgctaaaatcgcgcggcatggcgctgaattcaatatcgtgggttttgctcgggtcaagcagcgtacttccctggtaaagggggataatagcgccgtcggccagcggcgcggtgccgttaaccgcaccggtgactgagttcagctcttgccaggttccgcccttcaatagcgcctgcgcaggtgcgatcgacactgcaaacatgatcagtaatgtcagtaagaaatgtacaactttattcacttgccgattcctgtccatgagcgatagccacccgttttcattctctgtcgtaattcaacccactttgcttagcgcgcggctaagcaaagtgcgcggaaaataccactccccgcggggagtggtatgttgaggacaacttatttgcgtttgtagtcgatggacagaccaaagccctggacaccgtcgctacccacggtaacgccgccgtctgctccctcgaacgccgttttcgcttcggcgttggtgacagggatgacaaggtctttatcgttccagctttcgttgacgataccgccggtaccggtacctgcaattttactggtgccgacgaatttccagcggtagtcatactggtcggtaacgttttcaccggcatcataggtaccgttgccgttcttatcgctccacagcaatacctgataggtggtattcgttttgagtgtcgtccctgaattcttcaacaggttggtattcgaatctttctcatgaataaccacatggacgttttcatccaccaccggaccttccggaatttcgtcatcatccgaaccaccgcccgcatcggtcgacaggtctttcaacagcagttcggttgccacggcagggtcaccggtggtagtggttggcgtgattttgataccgatataacgatccgcatcagcggcctggatttcataactgtcaccagtaccaagatctttggggtcgctgccattctgatcgctaaagctcacccatttcacggtggctttagttgccgtgttgtcggtgtccaggtcgccttccgtatcgccaatcgcccagttcaccgtgaccttatcgccaacgtggaactgcttatcgccttcggtcacaattttacgatcgccgcgatcgatagttaccgttacgtgatctttgtcggtatccgcagttttatccgccgcacgggtaatccacggcaccgtaccctgaatggtgcccgtctgttcagagacaatctgccactgccccgatttcagattaccgtttgccgccaccgctggcgcggcgcaatacccggcaactactaatgctaaagcgaccttcgtcagccgccgttttactgttgcttgcattcagactctcctttttctcaaaattcagcggctggctggtcagccacaacgctgacgctatttctgactatacgtaacgcgtatgccgtaaccctgaacgccatcttccacattggcggcaaacttctgcgccgcctctttattggttactggcaggacaagatcttcattcatggtgttggccagcgcgccggtatgtccgtttgtactctgcccggtaaactcccactggtagtcgtacagcgccatctcttcttccgtgagctgctcggacatctggaatacgccgtctttatttttgtcgcgccacagcaggaaacggtaagcattattgaccgtagggtgcttatcttctttgccgataaggttgacagggttggcggctttgacctgataaatcaccgcattcagcgcgctcaggttgtcgccgataaaagtgacatcaacgtagttactgtcgccataggcgtctgctttcgccttccagcggaaagtccccggcagggtgctggaaagcgtcaccgtccccgcttctttgtcacgactggcaataaacacgcagggggtttccgtggtgcagggcgtctgggccagggtgacttttttatcattgctgtcgtacaacacgggcgtcatggcatcgtccaccagttcgttaccattgcgatccgtggagtcgccaaaggaatcggtgatcagcagatccatcaccacgccgtcttcgccatcggccagcgcgctggcttcatggctgtgatcgctgcgatcggtatcggcaatgttgtcgacgatcagctcaattttgcgatcctgctggacggtgatttccaccacgccggagttctgcttattgcccttttcatcttccagcgtcatgcgtactttccaggtgttcagggcggtgcgctgctcttcggtatcggcattaacccaggcaggaagcaccagattccagctgttattgttgccttcggttaacgcattagcttttaccaccggcatcaccagcgtacgggcggcgttgtttttcgcctgccaggaggcagaaataattttgtaatggtggttaatcagcgcgttgacagtccatttgcacttttccagaccaacagcggcctcaggcgtatcttcaatcacgcattccgggtgttcattggtggcgtcagccttcagccacaacgtgacgtccagcggatctttctcacgatattcgagaatgatgaaattgttacgatcgacaaaatcggtgcggctgcccattaaggagtgctgaattttaacgttttccggatcgagctgcgccgccagcggcgtgcctatctggtagttcacggtcgcgttaacgctaaagtcgttactatcgccagtaccggctttgtaatccgtaccaaccgtgaccagcggtaccggcgtatattccagccccaaagtgacggcatgaggatctttttgcagattatcggtgccaaacagcgctacttcatcgccgtagtactgttcgtaaactaatttagcgccaagctgcggataaaacggcagccagctttccatgcggatatcccagccgcgcgcgggtcgttcttcataaaagtcgaaatcttcggagtctttccagtcagaaagaggatggtaatagttgccggagaatttcaggtaatccgtccaggcttcagttcccagacctaatcgacggtgaccgcgcgtaaaatcgtagtcatagaatgcgttgccgccaagcagccagttgccgacgttctggcgaacgccaagcccaaagttaccaatggtgcggtcttccttacgctgagccgaaatctggctaaagaaaagcgtgctctggttgtcataccagggaataaaataatccagcgaactgccgtccagatcgccgccttcgcccacggacaggctggtacggatcttgccataaggtgacattacaccttcaagatatgactgtgctgaggaagtgatttggttttgcaaatagctacgcgcctgggattccagcgcttccggggtgagattatcaaagccctgggtggcggaattaataaagtagtcagcgccctgttctttaaaggactttcctttattttcctgttcttcttttttcgcggattcgctggctaaatcaggcagggaggagtggctttcatcatttgcagatgcagagttatctgcgccagaagccgcaactgagactccagacactaatagcaaaaccagaatgcgaatccttcgcaccatatgatatccctgtcgttaaataaaaacgcctctatgaaaagatattatatggatgattcagatggaatcataactaacaggcctaaatatattcctaaaaagaaaagtttaatatgaaacagatttataatattgatataataaataaaaagaaagctgttatttatttctaatattaattttcgggaataatattccctataaatagttgaatcaataaaaagaataaaataaccgccgggcaggatactatgctgatattacgggagtatcgaataacgcttttgcccttagccggataagacgtcggcgcctctgctctgcggcgcaacgtcgacagcggttttattgatcggaaatgacgaaattaacccgtttttttgaaattaaaccatgaccgttctggcaaaaatagtccactgcgccgcaggctttcaaaacctgtaacggctggcggcagtcaggacaaagtgcctgtaacgagaaatctttagcgcatgtctcgcaatgcgctgtatcgccattgcgctccagcgcgtgatggcaaacggggcaggttatttccataacattctcctcaggcgcgtgacttacttttacttgaaaggcctgatagcgcagcgcttgtcaggcctggaatattactgaaaaagcattacttgcttttcttgatatgtttcatcagacgcttacgtttgcgcatttgcgttggcgtcagtgtgttacgcttgttcgcatacgggttctccccttctttaaactgaatgcgaatcggcgtccccatcacttccaacgacttgcggaagtagttcatcagatagcgcttataggagtctggcagatcttttacctggttgccgtgaatcaccacaatcggcgggttatagccgccagcgtgggcatatttcagttttacacggcgaccacgcaccagcggcggctgatgatcttccaccgccatcgtcatgatacgggtcagcatcgcagtgctcacccggcgagtggaactgtcgtaagcctcgcgtacggactcaaacaggttgccgacgccgctgccgtgtagcgcagagataaaatggacgcgggcaaaatcaataaagcccagacggaaatccagcgtctctttcacctgctctttgacttcctggctcaggccatcccatttgttgactacgataacgagtgagcgcccactattgaggataaagcccagcagagacaaatcctggtcggagatcccctcgcgcgcatcgataaccaacagtacgacgttagcgtcttcaatcgcctgcaacgttttaatcaccgagaacttttctaccgcatcggtgatttttccgcgcttacgcacccccgccgtgtcaatcagcacatattcccgttcgtcgcgttccatcgggatataaatgctgtcgcgagtggtgcccggcatgtcgtataccaccacgcgctcttcaccgagaatacggttagtgagtgtggacttacctacgttcgggcgaccgacaatcgccagctttatcggcaggctttgcgggtcaaaatcatcttccggcgcttcttcaccattttgttccgcctcgaactgcgcccagtattccgcgtcttcatccacctcttcctgcggcgcgacatcatccatccacggcagaagcacatgttccagcaggctcaatacgccgcgaccatgtgaggcggcgatagggtaaatttcgcctaatcccagcgagtaaaaatcgacaaccgcctgatcgggatcgagaccatccgttttattcgccaccaggaaggtcggtttttcacgggagcgcagatgtttggcaatcgcttcatccgccggcatcagaccagcgcgcgcatctaccatgaataacaccacatccgcttcttcaatcgccagcagcgactgttccgccatccgcgtttcgacgccgtcttcggtgccgtcaataccgccggtgtcgatacagataaactcgcggccttcaacctccgcacgaccgtacttacggtcacgagtcagacccgggaaatccgcaaccagcgcatctcgggtgcgggtcagacggttaaatagcgtggattttccgacgttagggcgcccgacaagcgcgaccacaggtaccatgtttaaagcctcatttaaaaaatcatcagacaacgcgcgtcatttttacgccgttgttaaaaacaggaaaacggcccctacaccaggagccgttttttaaaacacacaaccgtgacgattaacgcgtaatcgcgtagaccgtaccgtctttggcctggatgagcagtttaccatccgccaccgtcggttcggtcagaaaaccggaactgtctactttttgttgggccacaaaacgcccgtcatcgacattaatccagtgcagataaccttcgctatcgccgacgactaaatcaccattatacagcaccggggaggtcagcaaacggtgcagcaaatcgctttgcgtccacagcgttacgccgccgtcagtggtcagcgccagcacgcgatcgttctgatcgaccaggtagatacggtctccgtcgacgataaagtcattgaccgaacccagctcgcgtttccacataatctgaccactgcgcagatccagcgccgttaagttaccattatacgccaacgcgtaaacgacgccgtttaccacaaccggcgtggtatcgacgtcgctcagacggtcaatttccgttgggccagtggcctgggagatacgctgctgccaaatcatctgcccttgttgcatcagcacggcgctgacgcggccattatcaccaccaacgatagccgcgccgaacgcggttgccggcgcagattcgccgcgcagcgacagcgaaggcatatccaggttcaccgtccatttaatggcgccatccgcctgatttagcgcctgcaactgaccgttgctggtatggataagaacgattccatcactgacaaccggacgagacaacgcttcgcctgcgaccttcgtctgccatgctgtggtaccgtcgctggtattcagcgcataaacctcggccttttcactgccgatatagacgtgaccgcccgcgacagtgacgccgccggacaacaacgcggacgaacgagagaaccagccgtctttctcgcccagattcacagaccagatctctttgccatcatccgcattgagcgcttttaccacgcccgcgcgatcggctgcatagaccacgttatctaccattaccggatgaaggttagaataaaattcgccaattccgttaccgacagaggtgctccagacagtggtcggggtaaactggttttcaacctgcggtaatggagacatcttgacgacatcttcttcgccgctaaacagtgaacagccgctgagcagggtaacggaaagcaaccctggcagaagtaatttacgcaattgcatcgggtccctctcagatggacaaattattgattttcatctgcatcatttcgctcaacgccggagaagcatcgctattgacgcccgcttcccatgcgctgcgcgcgccttttttatcacccttactcagcaacgcttcgccgcgcaaatcagcgacaatggctgtccatccttcgcctttaacggcatccagagttttcagcgcggcgtcggcttgcttaagctgcaactgaacgcgagcgagacgcagattaatcaccgctttgagattttcatcgctggtggccgccaacccctgctgcaactgggcttcggcttttttaagttcattcttatccacaaactgctgcgccagttccatagacgccagcgcaccataggtgtttttattctcagccgcgaatttttcagcggcgggaatgctatccggcttatcggcgcttaccgccgtcaccgcattttgatacgccagagaagcagcacgcgcggactccgtctgatggctgctccagtaacgccagccaaccagcgcgccaacccctaaaatcactccgacagccagcgctttgccgttttcggcaaagaagcgtttaatcgcatccacctggtcgtgttcgttctcgtaaatttccacgctgtccttctccttagcccaataaagtgcgcaaatgcgcggcgacgctgtcctgcgccactgccgtttgctcaccggagcgcaaatccttcactacaacagtcccatcggcgacttcagattcgccaagaaccagtgcaatacgggcgccccacttatcggcgcgggcaaactgtttcttaaagttgccgccgccgtggtttgtcattagcttcacgcctggcatttcatcgcgcagccgctccgccagcgtcattgccgcagactgcgtttgtgcgccggcagccaccaggtatatatcgacaacaggagaggcaataaattccggattaactgcctgaactaacaaaacaagtcgttccaggcccatcgcaaagcccactgccggggtagcgcgaccgcccagttgttccaccagaccgtcataacgaccacccgcacagacggtgccttgtgaccccagactgtttgttacccattcaaatacggtgcggttgtagtaatccagaccgcgtaccagacgctggttgacggtgtaggcaattcccgccgcgtccagcaatttacacaggccggcaaagtgctcgcgtgaatcgtcatcgagatagtcgccgagagcgggcgcgtcgttgagcagcgcctgcacgtccggattttttgaatccagcacgcgcagcggattggtatacatacggcgtttgcagtcttcgtccagcgtctcttgatgctgttcgaggaacgcgaccagcgcatcgcgatagttcgcacgcgcctctaacgaaccaatagagttcagctccaggctaacgtgttcagcgatgcccagcgcgcgccaccagcgtgcggtcagcataatcagctccgcgtcaatatccgggccttgtaagccgaagacttcggcgcctagctgatggaactgacggtagcggcctttttgcggacgctcatgacggaacatcggcccgatataccacaaacgctgttcctgattgtacaggagaccatgttcgatgccggcgcgtacacagcccgccgtaccttcagggcgcaatgtcaggctatcgccgttgcgatcctcaaaggtgtacatctctttttcaactacgtcagtaacttcaccgatcgcacgtttgaataacggggtctgctctacaatcggcaagcggatttcactgtaaccgtagctgccgagcacgtttttgagtgtgccttcaatgcgctgccagatggcggtttcgccaggcagataatcgttcatgccgcgaatggcttgaatgttttttgccacgtttattctctttctgaatataaaaatgaaccctcagcgcttccccgaacgaaccgggagccatgcgggttcaatcatacacgggaagcgcgccgcttcccatcacgttcttatttttcaacctgcagcacgtcaatccgacgcgcttcatcaagttgacttgctttcgcgcgaatacgggattcaagctgcgcgatcatatcgtcgttatcgagtctgtccttacgcacgccgtcttcatacaggccgcttttcttattgccgcccgtcacgcccagcgtcgataccagcgcttcgcccggcccgttcactacgcaaccgatgatcgagacgtccatcggggtgatgatatcttccagacgctgctccagcgcgttcaccgtgccgataacgtcgaactcctggcgagaacaggtcgggcaggcgatgaaattgatgccgcgcgcgcgaatgcgcagcgacttcagaatatcgaaaccgactttgatctcttccaccgggtcggccgccaacgatacgcgcagcgtgtcgccgataccttccgataacagcagacctaaaccgatcgccgacttgaccgccccgctacgcgcgccgcccgcttcggtgatccccagatgcagcggctgatcgatctgtttagccaacaaacgataagactcaacggcaaggaatacatcggacgcttttacgctcactttgaactgatcaaagttgagacgatcgagatgatcgacatggcgcatggctgattccagcaacgcctgcggcgtcggctcaccgtatttttcctgcagatctttttccagcgatccggcgtttacgccgatacgaatagggatgtttttgtcgcgcgcgcagtccaccaccatacgaatacgttcttcgttaccgatattgccggggttgatacgcaagcagtcaacgccgtattccgctactttcagcgcaatgcggtagtcgaagtgaatatcggcaaccagcgggacgttaacctgctgtttgataagcttgaacgcttcggcggcgtccattgtcggtacagaaacacgaacaatatctgcgccaacgcgctccagcgctttgatctgattaaccgtcgcttccacgtcagtggtacgcgtgttagtcatcgactggacggcgataggggcaccatcgccaatcggcacattcccaacgtaaatacgtgtcgattttctacgttgaatcggagcctggttatgcatgaaaaacctcccgcgttacccgtctgttactgcgccggtgtcggttcggcattaagggtcagacgcgcaacctgattagttctgataaagcggctcagatcgacaggttttccttgatactggatctgcaccgcggccggcgcgccaattttaagtttataaggcgcctgaccggttaggtttaaattaccatctttacgctgcataccgctaaacagcttcttacccgtggcgtcagtgacttcgagccagcagtcagcggtaaaattcatcaccagcgcgttcggatcggcagcaggcgccgctacgccagcctgactggtcggcagcgcggacggcgtctccgttgccgctggcgcggcagatgtcgcagccgtatcgacattcgcctgcgaaggcgcgactaccgtattttgcgtcgccgccgccgttggcgctggcgtttgcgtcgccgccgtcgaatcaaccggcgtcgcaggagccggagccgtttgcgctggcgtcgtatcctggcttgtcgcggcaccggtgtccagcggtacgctttggccgctgtctttatctgcgttcagttcagccgtgctttgatcggccatcgtcgtgatctcttcctgctgcgccttgtggttctgccaccaccaggcgccggtcagccctacgaccacaaacagtaccagccaggtaaaagacattaaccagccgtcgcgttttttacgacgctttcctaatgagaaactctgcatcggggcgactttagcggcgcgcagcggagcttgtttttccagccccggcagcagttcctcttctggaacatgcaccagacgcgcatatgagcggatatatccgcgcaggaaggttgaagcaagatcggacggcgccttatcttcttcaatatcgcgtaccgtagaaaccttcaggcaaagtcgctcagcgacagcctgctggctgagtccgagttgttcacgggcattgcgcagacgaacgccggtggtttgtgcttcattttggtcgtgcgtggcttcagtattcattcgctacagctacaggtacgtgtaaattaggattcaggcgccgacgagccgtaatgcccgcccacaccgcgaaacatcaggttagttaaccttagtcagacagtataagcctgtcaggccgcagatgacaaaaccgctaagacacaaggctaaactcttgttgcaccattacatactgccttaaagtcgacaaaaacgcaccgttattattgaccagacaagtacaacgccagacattattcaactgacattgcgccacggtataatgaatgccccgtggcgcaactgctatcaaatagccttgatgtcaatcacctctccctgcatacgcttacgcagggtacgtttggtacggtcaatcacatcgccagccaactgtccgcatgccgcatcaatgtcatcgccacgcgtcttgcgtacgatggtcgtgaaaccataactcatcaaaaccttagaaaagcgatcgatacggctgttagagctgcggccatacggcgcgccagggaacgggttccacggaatcagattaatcttacaaggcgtctcttttagtagctccgccagttgatgcgcgtgttcagtgccgtcgttaacgtggtcaagcatcacgtattcaatcgtcacgcgcccctgattggcgttggatttctccagatagcggcgaaccgcgcccaggaacgtttcgatattgtattttttgttgatcgggacgatttcgtcgcgaatagtgtcattcggcgcatgtaaggagatagccagcgcgacatctatcatatcgcccagtttatccagagcaggcaccacgccggacgttgagagcgtgacacgacgtttggacaggccgaaaccaaagtcatcgagcataatttccatcgccggtacgacattggtcaggttaagcaatggctcgcccatccccatcatgaccacgttggtgatcggacgctggccggtgactttggccgcgccgacgattttcgccgcacgccagacctgaccgataatttccgatacgcgcaggttgcggttaaagccctgctgcgcagttgaacaaaacttgcactccagcgcgcatcctacctgtgaagagacacacagcgtagcgcggtcgtcttccgggatatagaccgtttcaacgcgctgatcgccgacagcaatcgcccacttgatggtgccgtctgaagaacgctgctcttcaacgacctccggcgcgcgaatttccgcgacctcttttaatttgccgcgcaacactttgttgatgtcggtcatctcatcaaaattatcgcagcaatagtgatacatccatttcatcacctgatcggcgcggaaaggtttttcacctaagtttttaaaaaactcgcgcatctgctgacggttgagatccagcaggttgatttttgtttctttgttaggaactaccggggtactgctttcaggtgtgacaatttgttcagacatatgctattccggcctcgttattacacgttatggcccctggagggttgaaaaaagaaacgccccggtaagcttactgctcgtccgggggcgctgcattgtacaaattctggcgtaaggatgccacgtctgcacgcggcattagcaaaaataatatttgaaccgataatttatcgccaacgcatttacagcgtgaaagacgaaggagattaacgggtgcgcgggcacacttcgccttcaccgaagaaaaaggcgatttcgcgctgcgcggattccagcgaatccgaaccgtgggtgccgttttcagttaagctatcagcgtagtcggcgcgcagcgtacccgccaacgcgttcgccggattggtggcgccaagcagatcgcggtgacgctgtaccgcattttcactttccagcacggataccacgatagggccagaggtcatgaactccaccagaccgtcaaagaacggcttgccgtcgtgctcagcatagaagccgcgcgcctgctcaacggtcaggtgcagcattttagtgccaacaattttgaaccctgcagcttcaaagcgcgcaaagatgctgccaataacgttttttgccaccgcgttgggtttaatgatggaaaaagtccgttcaatagccatgtttacctctgaaatatgttctgttgttatgtcaggcgcggattataaagagcatcccatcaattgcctatggatgcaggtaacatttttttaaaataaaatgagcattagcaacaaaagttaaaggcgcacagcaaactcaggggactgacacagcacgcagtgcgtgtgttcaggcgtgagagcatgaaaagtacgtttgcagatgtcgcaggtgagcgtatacgccgtactatgccgcgttgaggcgggttccacgtcaaaccgcagccgcagcgcctgatgcggacataccgccgcacagccgccgcatcccgtacaacgcgccgccgctatcgtcagggtattgtcgtcaaactggataacgttttccgggcagcttcgccagcaggcgccgcacatcctgcactcttgcggactgatttcgggtacgcattcgctgaacgcggaaaacgcctgtctgagacgccgtttccccggctcgacggcgcacggggtaatggcgtcgcgcggaacatgaaacagagtgcgccgcgaggcgttaatctccgcgccgacaacgtgtttgaaagaccagcccggctcgccgtagcggcgcagcgctaaatttagcctcgccagcgccatcagccactgcgccgatcgctccaccgcaatatcaataaagcgaataccgtactggctgtgccagagaagcagttcatcgaccgttggcgcctgtagcgaaaacggccccaccaacgtatccccctgcacaaagcgtttaaccggtttgataccggtaatggcgtcaacaggacagacaaacagacagtcgccacaggctatgcagcgcgtcgtatctatgctgacctgcccctgcgccagcgaaaacgcctgcgccggacaaacatcggcgcaagcgcggcaggaagaaaaacgaaagcgacgacggacgcaggcctgcgtcacgtctaccgccggatcgatcgtcaggttaaccatcagccaatactaaagaagacgtagcgcagcataatctcgccgagaagcagcaatacgctgcccgccaccagcgtccctctggcgtttcgcagaccgcctgcggcaaagcagagcattcccgccgctgagacacaccagccgagaagatagacgtcacgcaactgcgccagcgcctgtagcggatgatgcgggaaagtgacgaccgtcgtatccaccgcattaatatccgccagccatagcggctgcatgatcaggcgaatcagcaccatcagtgcgaccaccaccacagcgcagcgcattgcggcgccagcgttgcgcagataagccagcgcaatgactaccgagccgataatgcctgacgtgccaaagaacagcgccagcgtgttgctatgctgccaggtcgccaccgaggcatggatataaacctgcgccatgcagaatacatccaccagcccaaacgctgccgccagcgccagcagcggctgccagcctggctttcggaaaaacagcagcacaatccctagccccagcgccgccagataaaggctggcaaagacgatttcgcgactcagccacgaactggcgacatgacgtaacgcatttagcgcattcaggggatagcccatgtgcagcgctgaagcaagcagccccacgcaggccagtacaaacgcccccgccatcgcgggaagcgcgccgcgtgcaggcacgcgtccctctacggcgtactggcggcccaacgccagccacactgtcacgcccacggacccttgcaaacagagcgtaaaaatcagcagcggtaactcatgcatggcgtttaccctctttttctgcgccctgatgcgctttgacaaccagattaggtttggttatggatgaatctggcagcccgttaacgtcgcatacgctaccgtacttcgcgcgcagttcatcaatcggaccaaacttgatggcctccagcggacaggtcgcaacacagacgggcggttcacctttcgccagtaaatcaacgcacatgtcgcacttagacatttggccggtctgctcgttaagctgcggcgcgccataagggcaggaccaggcgcaatagccacagccgacgcatttgtcggtatcaacgcgcacaatgccgtcacccgggcgtttatgcatagcggtagtcgggcaatttttggtgcagacagggtccgcacagtggttgcaggaaatggaaagcgtataagcaaatacgttattgctgaccccaccctgcccggtcgggatgaaacttccgcccttgacttcatagacgcggcggaaacgacggcctacttccagattgtttttgtctttgcaggccacctggcaggctttacaaccggagcagcgtgaggagtcgatgaaaaatcccagttgtttatcgctcaccggcgggtaatgtgtaaactgactcatgctttagccacctccaccagcatggtttgatgtgaatttcccttcgccagcgcggtaatacgggccgagctgaggacgttcgcacagccgcctttatcaacgccgttttcatccggctgccaccaggcgccagcctgcatcgcgacaacgccgggaataatgcgcggcgtcacttccgccgggatttcgcaaatcccgcgtgagttatgaatgcgcaccatgtcgccatgcgtaatgccgcgcttttgcgcatcctgcgggttgatccacaatgtctgctgctgcacttcaatcagccacgggttagcgtattgcgttgagttggcgcggttttttcctttccacgtaattaactggagcggaaaatctttcgccagcgcatcctccgggccttcatgcgcgggaacgtagtgcgataacgccgggatttccggatgctgcatgtcgtagaggcgcttcgagaagatctctattttccctgacggcgtcgggaacggatgattttccggatcgcgaatattgtcttcaaaggcgataaatggcgcgcttttgaacagatgctgacgggtcttttgcagcgtggcgaaatccggcagattttcgtccggcatcgccaggcgcgtctgttcccagatgtgttcaatccacgctttctcatcgcgcccctggctaaattcattctcaatgcctaatttcgccgccacctcacgtagccagtcgtagtcggagcgccgctcaaattcaggctcaatcagtttttcagagagtatcaggtagcttgccgtgccccaggtttcaccgatgttccagcgttccataaagctggtttccggcagcagtagatcagcgtatttcgcgctcggcgtcataaacagatcgctggcgacaataaactggatctttgattcatcctccagtacgcgtaccgcctggtgcagatcggggttctgattcgccagatagttcccggccagcgagaacagaatacggatgttactgtccagcttatcggcatctttcagccccatatccggcgtcactttgctggcgtcgtctgcggcctgcacccagttcatcaccgaaattttggcttttaccgggttatccggcatctccggacccgcggcgaatttacggttagcgcagccgccgtaacccgcagcccaaccgcctttgatgccgacattaccggtaatggtcgccagtagagtcgaaccgcgcgcggtgcgctcgccgcagttgtggcgctgtggtccccacccctgaatcaacgcggcgggtttggtattcgcgtaatcacgcgctaactggcgaatggtttgcgccggcacatgggtgatcttttccgcccactcgggggacttaacgacaccgtctttggcgccggtcagatacgccaccagcgattcgttagccggtacgccttccggcattgagtcttcatcaaaaccgatagcgtaacgcgcaataaatgcgcgatcgtgcagattctcgctgatgatgacgtacatcatcgcgtccatcagcgcattgtcggtggtgggcagcagcgggatccactgatccgccagcgacgaaacggtgtcggaatagcgcggatcaaccacgataaaccgcgtaccgttctgcttcatcttctgcaagaaatagttggtatgaccaaaaatggtctccgtcgggttatggccccacagaatcaccagtttggtgtccaaaagcgtatccagtgaactgccgctggcggcaatgccgtaagtataaggcgtcgcggccgccgtgttgcccatactcacagaatggtagctttcgagatatccgccggtcagattcaacaggcgacgtgccattttatcgccggaaaaggtgccgccggaaacggcggtaccaacatgaacatagcgcgaagccgggccatatttttcagtaatcgattttaaattatcggcgattaaggttgtcgcttcatcccaggaaattcgctcaaattttccttcaccgcgttttcctacgcgcttcatgggatatttaagtctgtcaggatgataaacaaatttacggtatgcgcgtccacgaacacaggcacgcatcaccggcatttgcgcatccagcgcattatccggtcgcgttgaaattcgcgtcacgataccgtcactaacatgcgcccgaatatcgcatttgcccccgcagtcaaaagtgctgcatgtctgaacgactttttccgcaggcctgttttcagttgccgtcacagcgcgcgcctgagcggtagctggcgaggagacaaacggtaacgcaataagcgcggagctggcctggataaagtggcggcgagaaatagcgggctgttcgccatttccctggctttttatatttttcatgatccgactcgtcaaataaaaacccattctcacgtttttatgcgctggttctcttgatatttatcaagctccctcattaagggtaattccggaaaaattaataattctcattaactttaaattaaatgaaattcataatttattctgaagagttgttaacgtattaattcaaaattaaccgctgcaacctgaccggactcatccattacgacaagttgataacgtccagcgatattgagtaataaagaaaggcgattattttcgccattaacaggttcgccatttaaaaaccaccagcgacgccctttgccgccggtagtcgagacgggcagcgtgacgttttcctggcctggcaattgcctgatcaccgcgccatccctcactcctgacagcattaacggcgcggcgtcattgccctgtagcggcggacagtggtcggacgccgcgggcaagcgggcgctacgtctttccgcaggcggcagccacggctccagcggccgcggccagacgataaacgtatgcgcacgcgcctgcggacagtcggcagcgacacgccgccccgtatcatccagccagaccgggaaacgaataccgttgatgtcttcctgctcaggtaacagcagcgtgggcggctggctgtcatcgagcagccatgtcgccagtcggcggcgacagttgctgtctccggcaggcagagtctgtccgcccggccagcaaatgacgccgcggcttaccgcctgcggacgcggatcttccggcaggcgtcccgtatgcgccagtaacagattattgacctggttaagcaatggcaccgcgctggcaaaaccaaattgccccaccacaggcgtgccgtcgggtctgcctgtccagataccgatgatatagcgcgcgttaacgccaatagcccacgcatcgcgatagccgtaactggtgccggttttccacgccaacggcacaatgcgcggcagcgcgttatccggcaagggttgcgcttcatccgccataatccgtcgaatgatccacgccgctcccggcgacattaatggtctttccgacagcggatcgtccggctgtaaccgtagtttcgccgctttcccatgacgagcgaacgcgctgtatgccgccgccatctcgtcaagccgcgcgcccgcgccgcccagaatcagcgaaagattgggcgccgcgccagcaggcaaatatagcggcaggccgacgttacgcagttttgccgcaaatcgtttcggcccataggcttcaagcacctgaacggctggcagattcagcgagcgtaccagcgcgtcgctcatgctgaccgggccgtgaaatccgctgtcgaagtttcccgggcggtaatctccggtacggcgcggaacgtcctgtaataatgatgcgggatggatcaagccgtcatccagcgccagaccatacacaaagggtttgagtaccgatcccggcgatcggatcgccgttaccatgtcgacatgaccaaaacggctgtcgtcattaaggtctaccgatcctacccagccgcgcacgctcatatcggtatgatcgacgacgatcatcgccaacgaactgcgtgcaggcagccgccctttccatgcccgcgccagatcttccagttgccgctgcaacccggcgtccagcgtggtcacaattttgtcgttctggcttttactcaacatcattcgggcaaaaagcggcgccagttgcggcatttgacgcggcgccagccagaccggttcttcacgcgactcgcgtaccgtttcggcaggccagacgccctgcgccgccatccgatccagcactttatttcgtgccgcttcggctctcgcaggccagcggtcggggcgtaaccggctcggcgcctgcggcaatacggccagcagcgccgcgtcagcgtagctcaggcgcgcgggcggcttgccgaagtaggcccagcttgcagcgccaataccctgtagcgtgccgccgaacggcgcgcggttcaggtacagcgtcaggatatcgcgcttggacaaatgccattcaagctggagggcgcgccaaagctggcggattttaccgccgaacgtgcgcgaatgcgggtccagcagtctcgccacctgcatagtcagcgtactgccgccggaaataacgcgcccggcggtaagatcctgccatgccgcgcgcgcgacggagaaagggttaacgccagggtgccgccagaaccagcgatcttcgtaattgattagggcctccaggtagcggggagagacctcttcaatcgtcaccggataacgccagatccccccggcgtcggcaaagcgccacagcggcgtaccgtcatgggctaccacgacccgcgcaggatggacctcattgagcggcagcggccagagtttatccgctgcccataacgccaggaaaataaaaagcggcgcgcccgccagccacagccagcggccacgtttaccacgccaaccgttcatttaaggcgtcacaatcagcagcccctcgctcgcgccggttgcccgccactgaggcgcatacatcgattccacctgcggttgcgcaagctggtacgtccccggcgttaccgcgcgcgccaggtagaccagcgtcacgggctggccctcattgacaacgacggcagccacaaaccgatcgtcgcggaattccatatactgaatatccgcctgctgcatctgattaagcagattttgcacttcgctaccgctctccggcaggctggcgctgctgtcagccagattctggttttccagctccagcccggccgggagcaggtccaccaccagcgcatccggcacattgcgatcggccactaccgttaaccagaccagcaccagttcgccgctacgcaacgaggacagcgatttacgctgaccatcggtccccagtatttgtcgttcaatctgcaaaacgttgctggcaggctcaggcgcagatgagggatagccgctgctatccagacgcagccatagcggctggctaccggtgttcgtcacctcaagggcggccagctggtcagcatccagattacgggtcagcgccttgtcgcccgacagcggctgcgcctctaacgaggtctgcacctgccaggcgcccgcgctggcctgtcgcgaatgcgcggcgaggaacaaggcattgttctcctgggtagagagccagcgctgaccgaaggcctgctcagaaagcgagcttaatagcgcgttttgcgcgtccggtctgaggttgttctcttccagtagcgacaacatcagagcgttatcgcgcagagaactgccgtaatccgctatccattgccgttcgtcctgacgcggcgtattcagagccagcgtaatggcctcttcgccgcgtctggcatcacccatcgtgtttaacgcgatgcccaattgcatcagcggcagtcctgaagccgcctgactacggcgctcccagatttcgcgcagcgtgccgagcggcgctttctgctgacgcgccagtaccagcgcagcgtaagcctgagcggcaaaagtactggcctgagtattatcgctataacgaatcagcatcgtaccgggatcctgcagatagcgcagcagtcgctcattgccccggttaatggcctccggcgggacgctatatccctgctcgcccgcgcgaataaggaaatccatcgcgtagaccgttagccagggctcttccgccccattttcatcccatagcgcaaaaccgccgttatcacgctgcatctgtagtatccgggagatgccgatatctaccgcagcgcgccgtttttcatcgctatcgccggtaataccgagcgactgcaattgagcggcattggtatacagcgccgggaataacccactggtggtttgttccaggcacccgtacggatatgctttcagctcgcgaatgtagcgcgccagattgagcggcggttttccgcttaacagcagttgtccctgtaacgtggctggcgagatgtttgccagatgctgctctggtacatgccagctctctcccggagccagcgcaatgccgctatttaccgtttgggcaggccaggccggacgcacgccgatttgccactgcttatgctgcgcgtcgagggtttctcccggcagattcagaccgctaatggtcgcctggatttcgccttcgccaaaaccttccagcgcgcgtaccggaacgaataaggtggtgcgcacgcccggcgccaggttgaccggttgcggctgctggctaagcagttccagtaacccactggcggcgagcgcaatattcagcgtctgcggacggtcggtcagattggtgacgtccagcaccagtcgcgaaacatcccctcccgccagaaaacgcggcatattcagctcggcaatcactggcgcggcgacaacgactttgctttcgccgcgaccaaaatcgtccgctgtccatgcctgcgccataacccgcagttcgccgttaaagtcgccaatcggcagcgttacgaccccttcgccctgctcattgagcgtgatcggctgcgcctgctgcgcgatgatattgacatggtttaccggcggttttccgccgcgcttaaggtcgtcgccatcgccgccaaaacgcaacgccgccagccgcccctgcccttcaatgacctggccgtaaatatcgtagatatccgcaccgtagcgtttttgaccgaagaacgcctgccacgggtccggcgtcgcgtaatcggtgatgttcaatacgccgctatcgaccgcggagaccagcacgttgatctgttttggcatttcgccgtgtttaacgctggctttaaccctgacggtgagcggctgattcgggcgcattttagccgggctttccagcgccagatcgaggcggcggttgtcatcccccagcggtagatgtagtaaccccacggcgcgttttggcgtcgcggaacgagatttatcgccgggacgcaccaccagcgtactgagatagagatcgtggcgattccaggttttatccaccggaatcgtgagctccagcccctgcgccggcacgtcgatcgcctgccaccacagcggaccatcgctggactccaccatcgcataacctttaccggcgaccggcgcggcgatatgcaatttcatggtatcgcctggacgataattcgctttatccagtttgagggtgacgcgatccggacgcgccgcgccgctaccgtcgctgttatcctgccagctatagccggcccagaaacgaacgctgctgaccgtctcattcggcgctttgacctccagacggtacgcgccccattccaccgggaagctgacttttccggtttcatccgcgttcagatccagcgtctgctcgccctccaccagatctttttgatcaaactgcgactgccagccttcgctttccgaccagttccagtaatagtcgcgacgctcgcggatgagccgcacctgtaaaccggacaccgcttttttctcgccctgcgcgttggcgtaaacaatatcgaatgcggcgttgctgtcttcgtcgacaatcggttgattaacggtggtatccgtacggtagtcgtataccgctttggcggcgaactgtggacgaattcccggtaacgtatcggcaggccaaatcgcctgctctacgcgacgagtgaccggacgaccgccagactccagcaggctggcctgtagaattacctgcagcggcgaatgcgcttcttgccactggctggcagcactcacttcaccacgtccgcctttatccaacgtcagttgaacttcgtccaggctgcgcgaaagattctcttcggcaatattgccgaactggaagccaggcaacgccgcgacagcgtcgcgcaggggacgcaggaaaagttgcccttgcagggtattgccgttagcaggcgcgccatacaagtaatagccgacaacggagaatttcacctcatccgcaggcgccagcggtgttttttgcgccgtcaggttgagcgccatccgctccggcataaagtcttccacgtggaaatcccaactccgcagcaaattatcgccggtgttggcgcggacatgccacaagccggtcggcgcgttgatatccagcggataattcaaacggtatagcccgttttccggctggctgacgacggtacgcatcacctgtccgtctggttttaccacttccagcttaacgggttgatcgggcagcgttttaccgtcgctatcgcgcagtaatccgttgaggataaccgtttcgcccgggcggtagagatcgcgcgggccgaacataaagaactgcttgctgtagccgggcgcgccagcgacattaaattccgacagatccagagccggaagcgtgagatcgagcagcgtggtctgctcctctttacgcgccagtaatagcgccgccgctttatcagcctccagttgcacatgtccctgcgcgtcgctcgtcgcctgcgccagcgtctgccctttatcattcagaagaacgatctcaattcccgactgcgccgcgccgttttccaggctttgcgtaaagatatccagccgattatggtaacggtgcgcggacacgccgatatcgctaagggtaaacaacgtagcggcattactatagttgtagtgtccagcctgattcattaccgccacatatacgcccgcctgttgcagcggcttaatatcgcttaatggcagcagcagtttctcacgcgtattgcgcgccggattaagatcaaaacgaccggtataaaccagatccgccattttcagcagattgtcggactcccagttagagagagaactacggtactcccactggctgacaaatgacgccagcgatccgggcttaacgcggaaaaagttcacatcaacgtggttgacgttaagcgccatgaccggcagtccttccgcgattttccccggtagcagcgatccccggctggcaaagccgacgctgggctggacatcacgcgtggtaatcgttttttcataagacttgccgaaggtggcgttattcagcgccttaacggcgggatcaaccgtgaccaccagcacgcgctcaggttccagatgacgtaaccttagctcttttaaatttggcgccagctcccatgcgccgtcaacgctgccgcttttcttatcaaccacgtgaaccacacgggagaaatcctgttcaggatctaaaggaattgaaaacgtcagcaccagcgtcgccgcgccgtcgagctgcgcttcggaggcgtctaatagcgtgagcgctttgccctggctttgctgcgccagcttttgtagctgtgccgggtcttgcgcgggcgagggctgcgctacggctggcgcttcgcttttagtcgtcggggcggttttatcgttgttatcgcatcccgccagcgccagcatgatcatgcaggccaccacgcgtaaatgtttcatctttcatccctggccttaacggcctgtcagcaacggttgatgagatattatgcgcgagaaattttattgtgtaagtccgtattactgtgatgatgcgaaaattttacgcagaaatgtggtttcgccagccaaaacagcctcttctacttgtcccttttcgggaaacgtccgacaatttgaccataatcaggtaacaatggagatgcccatgaccaccgccttttttgtcgccgccgactggcttgccgaacatattgatgatccggaaatacagattcttgacgcccgtatggcgccgccaggacaggaacatcgtgatatggcgggcgaatatcgcgccggacatattcccggtgcgctgttttttgatattgaagcgctctccgatcgcgcatcgccgttgccgcatatgatgccgcgcccggaagcgtttgcggtagccatgcgtgaactgggtgttcgtcaggataaacacctggtcatatacgatgaaggcaatctgttctccgctccgcgggcatggtggatgctgcgcacgttcggtgccgagaaagtgtccattctggcgggcggactggcgggctggcagcgcgacgaatggctattgcgcgaaggcgaggaagcgcatgaaggaggcgagtttgaggcgaaattcgcgccgcaagccgtggtgcgtctcaccgacgtattgctggcaagtcatgaaaaaaccgcgcaaatcgttgacgcgcgtccggcggcgcgttttaacgctcaggctgatgaaccgcgtccgggactgaggcgcggacacattcctggcgcgctaaacgtcccgtggacggaactggtgtatgagggcgaattaaagaccactgacgaactgaatgaggtttttttcagccacggcgtgagtttcgacagaccgattatcgccagctgcggttccggcgtgacggccgcggtcgtggtgctggcgctcgccacgctggatgtgcctgacgtcacgctttacgacggcgcgtggagcgaatggggcgcgcgtaccgatttaccggttgaacccgcttaatatccgccatgccggatggcgctcacgcttatccggcctaccgttcaggctgatgtaaaacgatctacagacattgtttttattccgctcttttccgctgtcctgcaaacgggcattattttctcttaataaaatcctattttttatcggtaaatactttacgtccggtataaggagtatcattaccgctgtttttgttttcaccggaaaataactcctgtaaatataattttttaaggatggaaaatggatatttcactcactaatttaattgagttggttaaaaaggttaaccgtaataaggtacctactcctatgtctgccgaggaaataagtcgtctgcgagtgcgtaagtatcgcgatccgcaaaatacggaaaccactgagttacctgaaagcctgaaggcgctactggcctacgaccgcgatctcctgagcaattataatatgcctgtgattgaaacattacaaaaatctattgataacgagggagtaattcattcttactcccctgatgaagaggcgtattacggcgttggcatggatagctcaggtattgatattgaagatctgatgcctgtctggagtaacgatccccgtcttccggcattaattcgtatcgatcatgtcggcgatcaggccatttttatctatatcacagaacgggatgccaacggcgaataccctattgcccgcatggaacgtaatgaattctggctggcggagtcttccctggtggaatatctctataatattatttcgggcgctaaagacattggctttaccgaagaggatttacatcttccgcaatggaaggcacagcaaaaaatgaatgaacaacgcgatgccgctttacttgacctggaggattatcatgaggcgttttgggcaaaactggacgcgctcgtcgattaatcgacatgatgtcgggtggcgctcacgcttatccggcctaccgttcaggctgatttaaagcgaatctacataaattctgtttaagcaggccacaaaaaaaccgctcaattgagcggtttttttgtgctggtccggttcgcggcctttccagcaggctttgttgccatagcaacgcaggcacaccgtaggggattaatactcccttttaagggagcaaatgtcaatatgatttaccgggaaactattcaatatttgaggtattatctttcccggccctttccgccgtctcgcaaacgggcgctggcttcaggagaggataacccatggccgtaagcgcaggcacaccgtagtgcctgctatcacggcattatcgccagcggtgctgccgtgatgcggtcttcgcaaggaccgcaacatgaaggtacgatgcttttgtgtcgtgcttcttgtttctggcacgttgtgtcttcacgcagacagaagctacccaggtaattctgttcccgtaacgctcaacgtccagagcaggtaagccaggaggccgccctgttgggcggctttcttttcttcagatgatgcggttctgtttaaaatcgcgcaggaacccgccccagcggcgctcgtagaacggcgcgatatgctcggtgataaagtggctgataccctgctcgcccttcctcacctgacaaatatcgatcggttcgtcacccggtaacgtgtcggtcgccacattgcccgctgcgtgaatgatctcttcaatttcgccgtcagcctcaatgccaatcagcagattgggttgggcgtccgcatgttctttaatcgcgcagagaaacgcgcgtttcaccggtttgatggttttaaacagcgtagtgagggaatcaatcatctgcgacggcggctcggccacttcggatagaataagcgactcgccgccttccagcacttcctgcgtacttaacggactgccttcctcagcgagaagcaggctgatttcacgcggcataaactctttgccggtcggcaatttagcgttgaggaatagcgtttcgccaagcgtcatttcaaacagcgtgcgcgccggcatcaccacaaacgcctgttcgtcttccacggcctgctgcagcgcctccagagaagtaaagaagggaatgacggtcgtgccgtcttctttttcccagtgctgcaaatccagagcgctgtcttccacaatcgcctcgccttcggcagcgctgcccggcacccagacggtggactccagtaaggtacggaaaaatgccggacgatgcgcgggctcagtcgccgctttctccagcaagatttctaattcatttttagtttcggacataggaatcacaaattatgtatatgggttgtaggcctgataagacgcacggcgtcgccatcaggcaaaatgccgggtggcgcttcgcttacccggcctacaaaaacaccgttcaggcggtcagcaaattcgcgatggtgcgcacacccagaccggttgccccggcagcccactgctcaaccggcgctttgcgataagtggcggaacagtcaatgtgcagccagccttcgcggtaattttcaacaaagtgcgacaaaaaacccgcggcggtgcttgccccggcgggataagccgcgctgccggtgttgttcagttccgcaaagttagacggcagctggttacggtggaactccgccagcggcagacgccagaacggttcattttcttgcgccgcgctggtcaacaagcgccccgccagcgtatcgtcaaaactgaatagcgcatggtagtcgttacccagcgctgttttcgccgcgccggttaacgtcgccatatcaatgattagctgcgggtgttgcgcgctggcgtcaatcaggccatccgccagtaccagtcgcccctccgcatcggtattcatgacttcgacattcttaccattacggtagcgaataatatcgcccagtttaaacgcattgccgctgatcagattatcggcgcagcacaggaacagttttacgcgtttattcaacccacgggtaatggcgaacgccagcgcgcccgttactgtcgccgcgccgcccatatcggatttcattgagtccataaaagcgctttgtttgatactgtagccgccggagtcaaaggtgatacctttaccgaccaggcaggcataaaccggcgcatctttgtctcccgtcgggttgtaatccagcgccagcagcaccggcggacgctcagaaccacggcctacggtatgcaaccccatatagttctgctcgcgcagatcttcgcctttggtgatacggtaagtgacgctatcgcacgcgacgctgcacagcagatccactgcgcgctgcgccagttgctccggcccaagctcttccgccggagcattaatggtgtcgcgcacccagtcaataatggtcaggcggttatccagctcctgacgttgggcatcgtctaaatccggccacattacggtacggacgccttttggtcctttgtaacccgcccagaatgcccaacaacgctcggtatcccatccttcgcctgtcagcgcgacctgttttattcccaggccgtcgattttacgcgccgcacgctggatcaatcccagatcgtctttaccgttaagatgcaaggtaataccgtcgttattaatactgtaagtggctttatcgccccagcgcgcatcggcaggctgcgtggaaagcgtaattttcatggcttctgtcattgttattttccttattagcaaacgggccgccgtagggcagcccgttagatcttttgctaaatgattcgcgttgcaggaaggcggcaagtgagcgacaaattcgtcgggaacgaatttgcacagccaaaggctgcctctggtgagggacaaggatgtccctcatcatccccgggagcatagcaaactatgtgactggggtgagcgaacgtagccaacgcacctgcggcgaggatcatgacgcaaaaattactctgcttcatccaaccagactagcagaatcgcctccagaattttttcattggatgcgttagggtcgtcgtcaaaatcgtccagttcgcagatccactgatgcagatcggtgaaacgaacggttttaggatcgacatcaggatatgcgtcgtataacgcttcgccgatctcgcggctatcggtccacttgagtcccatactaccctctgttaatgctcacgcgcatggttgattgtgtaacgtggaatttcgataaccagatcgtcgtcggtaacgcgggcctggcagctcagtcgactttccggctccagcccccacgctttatccagcatatcgtcttcttcttccgaactttccggcaaggagtcgaagccttcacgtacaatacagtgacaggtggtgcaggcgcacgatttctcacaggcgtgttcaatctcgatgccgttgcgcagcgcaacgtcaagaatggtttcaccggtctcagcttccagaactgcgccatccggacaaagatcctgatgaggcagaataacaatcttcggcatgttaaacctcgtctacggaatggcctttcaacgcgcgacgaaccgactggtccatgcggcgagcggcaaattcctgggtttgtttatctacgtttttaatggcttgttctatggcgtcaacatcatcgccttgtgcgaccgcgcttaaatgtgcggcggcatcatcaatgcattgacgttctgcggcgcttaacagcgcggcgtcggcagttagcgcgccggtcaaactttccagcacgcgcgcggcttcgactttttgctccgccagcatacgcgctttcacgtcctgctcggcaaaactcatggaatccttgatcatcgaggcgatttcgccatcggtcaggccataggaaggtttgacctgaatggaggcctcgacgccggtggatttttccattgcggtgacgctcaacaggccatcggcgtctacctggaaggtcacgcgaatatgcgccccgcccgccggcagcggcggaatcccgcgcagcgcaaagcgcgccagcgagcggcagtcctgcaccagttcgcgttcgccctgcatcacatggatagacatcgcggtctggccgtctttgaaggtggtgaaatcctgcgcgcgcgccaccgggatagtggtgttgcgcggaatgactttttccaccaggccgcccatcgtttccagcccaagagagagtggaatcacgtccagcagcagcatttcgctgtccggcttgttgccgaccagaatatcggcctgaatcgctgcgccaatagcgaccactttatccgggtcaatagcggttaacggcgtgcggccaaaaaattcgcccacccgctcacgcaccagcggtacacgggtcgaaccgccgaccatgaccacttccagaacgtcctggggctcaacgccggcatctttcaatgcgcgacggcaggccaatagcgtgcgcttaaccagcgcggaaatgagatcgttaaactgctcgcgagtgatctccccctgccagcccgcaacgttaacgcgaacggtatcggcatcgcttaaggcgattttcgccgcaatcgcggcatccagcagttcgcgctgaacgcgattgtcgctacgatcggcaattcccgcctgctcacgaatatagtccgccagcagatggtcaaagtcgtcgccgccgagcgcagaatcaccgcccgtcgccagcacttcaaacaccccgcggctcaggcgtaaaatagagatatcgaaggtaccgccgccgagatcgtaaacagcaataacgccttctttgcctgagtccagaccgtaggcaatcgccgccgccgtcggttcgttgagcaggcgcagcacatgcaggcctgccagccgcgcggcgtctttcgttccctgacgttgggcatcatcgaaataggcgggaacggtaatcaccacgccatccagctcgccggagagcgattcgctagcccgcgcggccagcgctttgagaatatcagccgatacgcgcaccggattgagcaatccagccgccgtgtcaatcatcggcagcccattaacgcttgccttaaaccggtaaggcagatgcggatagcgcgtctggatatccgccagcgagcgtcccatcatgcgtttcacagagctgatagtgttggccgtatcctgcgcggcattgtcacgcgcagcgtaaccgaccgtatggccctgctgctgatagtgaaccactgaaggcaacaggtggcgcccttcgtggtcaggcagagtttccgcctggccgctgcgaaccgtcgcaaccagagagttggtagtgcctaagtcgatgcccgccgccagacgacgctgatgcggcgcggcgctcagaccaggctcactaatttgtaataaggccatgttagattccagttaaaaatcgagcagcttttcttcgagttgttctgcgctgcttcgcagtttatcgagaaaccgcagtttgcgcaccgtatccgccgccgcgtcccacgcggcgttgtccaactgttccaccatttgctgaagacgagcatcaaacatcttttgtacgcgtttgatgaagctttccagccgcgcgtcgtcttttgattgttcgatatcgtccagctcttcgcgaagcgtgagttgttccatcagaaacgcggtgtcgcgtaccgtatgttgctcgctggccagatcgaacccgtgtaaggaaagcagatactccgcgcgcgtcaaagggtgacgcagcgtttgccaggcctggttgatcgtggcggattgctggacggcggcaagctgctgcgcctgagtgccgttggcaaatttgtcagggtgatactggcgttgcagatcctgaaaacgaaggctcagcgcctgggtgtcaatctgataacgggctggtaagccaaagagggtgaagtaatccataacattctcagggatagcctgtcagaacaaaccccacacgcaggcgaccacggtggggttataccttcttacttcgcgccgcagatgcgttgtctgcgcgggttcccccagtcatttactcaagtaagcgccaggggattcactcgcttgccgcttttctacagcacgaatgctcggtataacagcggaacacggttacacgtggaagctttcgccgcaaccacactcatctttcacattcgggttggagaatttaaacccttcgttcagaccttcttttacgaagtccagctgtgtaccgtccagaaattgcaggctcttgccgtcaaccactaccttaacgcctttgtcttcaaacacggtgtcttccgccgttggctcgtcaacaaattccagtacataagccatacctgagcagccggaggttctcacgcccagacgcagaccaaaccctttaccacggttggccaggaaggtattaactcgcgctgctgcactgtcgctaagtgtaatcgacataacaaaacctcaatgttaacgttctattttatttcgcttcgcgtttgcttttgtaatccgcaatagcggctttaatcgcgtcttccgccagaatagagcagtgaattttcaccggcggcagttccagttcgtctgcaatgtcggtgtttttaatcgcctgcgcttcgtccagggatttccctttcacccactccgttaccagagaactggaggcgatagcggaaccgcagccgtaagtcttgaagcgcgcgtcttcaatgataccttcatcgttaactttaatctgcaacttcatgacgtcgccgcaggccggcgcgccaaccatgccgcttcccacgttatcgtcgttgttgtcaaacgaccctacgttacgcgggttctcatagtgatcgattactttttcgctgtaagccattataaattctcctgattccgataccgattaatgatgtgcccattcgatgctgttcagatccacaccctgcttgtacatttcccacagtggagaaaggtcacgcagacggccaatggatttacgaaccagatcaatggtgtagtcgatctcttcttcagtggtaaaacgacctaaagagaaacggatagagctatgcgccagttcgtcattcatgcccaacgcacgcagcacgtaggacggttccagactggcggaggtgcaggcggaaccggaagagaccgccaggtctttcagcgccatgatcagcgactcgccttcaacgtagttaaagctcacgttgagaatgtttggcgcgccctgctcaaggtcgccgttcaggtaaacttcttcaatatctttgatgccgttccacagacggttacgcagaccgcgcagacgggccatttcggtctccatctcttctttcgcgatacggtaagcttcgcccatgccgacaatctggtggacaggcagagtaccagagcgcataccgcgttcgtgcccgccgccatgcatctgcgcttcaatgcgaatacgcggcttacgacgcacatacagcgcgccaatgcctttcggaccataaattttatgaccggagaaggacatcagatccactttcagttggctcagatcgataggcagtttgcccacgctctgggtggcatcaacgtggtagatgataccgcgcgcgcggcacatttcgccgatggtcgcgatatcctgcaccacgccgatttcgttgttcacgtgcatgatggaaaccagaatggtgtcgtcacgcatcgctgcttcgagctcgttgagatcgatgatgccgttgcgctgcggcgccaggtaggtcacttcaaacccttcgcgctcaagctgacggcaggtgtccagcaccgctttgtgctcggtcttgctggtgatgatgtgcttgccttttttctgataaaagttggcagcgcctttaatcgccaggttatcagactccgtcgcccctgaggtaaagacgatttcacgcgggtcggcgccgaccagttcagcaatctggttgcgggcgatatcgacggcttcttcagcctgccagccgaaacggtgtgaacgagacgccgggttcccaaaggttccgtccagggtcagaaactgcatcattttctcggcaacacgcgggtccaccggcgtggttgcggagtagtcgagataaatcggtaatttcattgctcttaaactccgtacatcactcaatgcaaggaatcaggcaaccggctggatgtacgaccgtgttgacgggacgtccgcgtcccggcctgattctgaattcttttttacgcttcatccttcagacgaccgcggcgttcaccgcatgaggccgccagaagagatggcgtaatattttaattaagcgcgtaatttaacgtcgatagcgtcctgcgcacgaccgctggcgcgcggcgcgtcatgcgtgtgctggcgaccagacacatccagaacttcctggttattcaccagctcgcctaaggtaatattgttgagaaaaccggtcaggcgatcgcttaaatcacgccacagcgcatgggtcaggcatttatcgccgccctggcagccgcctttgccctggcaacgggtcgcgtcaacggattcatcaaccgcgctgatcacttcgccgaccgcgatactgccagcatctttacccagcagataaccgccgcccggcccgcgtacgctggaaaccagaccgtttttacgtaaacgggaaaatagctgttccagataagaaagggaaatcccctgacgttcagaaatatcagccaacggtaccgggcccgcttcggagttgagcgcaacgtctaacattgcggtcacggcataacgccctttagatgtcagtctcatgtcttacttaacctcaaactcgcccctgcccggggttttttattgtaaaatgggggtattgcatagcagggacaagtctgacattcccgagtaatttggtcaactatttacttgagtaaattagtcaggtatttagcgttccgtgcgatattgacgcggttacttgcctttattctgctgctcaatagacgccagaatcccacgcagaatattcaactcctggctttccgggcgggcgcgggtaaacagacggcgcaatttattcatcacctgccccggatggttttcgcgaataaagccagtggagagcaacgtttgctccagatggccgtagaagcgttcaagatcgtccaccagcggatacggcgtctcttcatgatctgccgcgtcgccgttttcctgcgtcgccagccaggccatgcggacttcatacgcgatgacctgtaccgccatcgccagattcaacgagctgtactccgggttagcggcaatagcgacgtgataatggcatttttgcaactcatcgttagtcagcccgacacgctcacgaccaaaaaccagcgcaaccggcgtatttgccgcttccgccacgctttttaagccgcactcgcgcggatcaagcatcggccacggcaaagtgcgggaacgggcgctggtgccgaccaccaggctacagccagccaacgcttcatccagcgtatcgacgatctgcgcattaccgatcacatcgctggcgcctgccgccagggcgatggcctgggagtccggtttcaccaacgggtttaccagccacaggttagttaagcccatggttttcatagcgcgagccacagagcccatattgccggtgtgggaggtttccaccagcacaattcgaatgttttgcagcattgtctttcttcagctaaagattattctgacatcttaccataaaaccaagacagattccgatctcgctgctatactctgcgccgttttcccgttctttaacatccagtgagagagaccgatgcatccgatgctgaccatcgccgtgcgcgcagcgcgcaaggcgggtaatgtaattgccaaaaactatgaaactccggacgctgtagaagcgagccaaaaaggcagtaacgattttgtgaccaatgtagataaggccgctgaagcggtgattatcgacaccattcgcaaatcttacccgcaacacactattatcaccgaagaaagcggtgagcacgttggcacagatcaggatgttcaatgggttatcgatccgctggatggcaccaccaacttcatcaaacgtctgccacacttcgctgtttccattgctgtacgcattaaaggccgtactgaagtggctgtcgtgtacgatccgatgcgtaacgaactgttcaccgccacccgcggtcagggcgcgcaactgaacggctaccgtctgcgcggcagtaccgctcgcgatctggacggcactatcctcgctactggcttcccgttcaaagccaaacaatacgcgaccacctacattaatattatcggcaagctgttcaccgaatgcgccgatttccgccgcaccggttccgccgcgctggatctggcctatgtggctgcaggtcgtgtcgatggtttctttgaaattggccttcgtccgtgggatttcgccgcgggcgaactgctggttcgtgaagcgggcggtatcgtcagcgatttcaccggcggtcataactacatgatgaccggtaatatcgtggcggggaatccgcgcgtcgttaaagccatgctggcgaatatgcgcgacgaactgagcgatgcgctgaagcgctaagtctcttcggcggatggggccactcatccgccgtgccttttcaggcgtttttcctaaacacagcctcatcgctttacttgcctgcatgtttttgtacgatcgctccctgctccgctattggcataaagcggcaaggaagcgaacatgacccttcaacatacccgacgcatcgtcaaatccctttttattctgtttatcattgtggtctgtatttatctgctaccccgcgtagcgatcaatgccttttattacccggacaataaagtctatgggccaacccctgccgaagctgaatccattacctttaccgccaaagatggcacgcatctgcacggctggtttattcccactgctttcggcaggccggaaaacgccgtcgcgacggtgattcatgtccatggcaacgccggaaatatgtcggcgcactggccgttagtcagttggctgccagaacgcaacgtaaacctgtttatgtttgattaccgtggttttggcgaatctgagggcaccccatcacaagaggggctactggacgatacgaaaagcgcgatagattatgtgcggcatcgcgccgacgttaaccccgagcgcctggtactgctggggcagagcctgggcggcaataatgtactggccgccgtaggccactgcgtaggctgcgcaaatatgcgctacgccgaccaggcgggcatacgtgcgattatccttgactcaacgtttttatcctattcctccatcgccaaccagatgatcccgggcagcggctatttgcttgatgaccgctatagcgcggatcgcaatattgccagcgtcagccccattccggtattgattcttcatggcacggcagaccatgttattccctggcaggacagtgagaaattgtatgccctcgcccgggagcccaaacaaaaaatcttcattcctgacggcgatcacattgatgctttttccggacgttatgcaaacctttaccgtgatgcaatgattaaatttattcagaccgcgctatccgctaaatagcgcgacgctgtatatatgcatattttatgattaagaatatatttattataccgatagtaaaaaccattttttcccgttagcgaaggcggtggattagcgctagcgtaacagtaatattcaactgatttttataacaatttattttcatttgtttttcctgaatattactgtggagtatgtgatggctatcaaaattacgcctgacgagtttagtttgcttatccagcgattaaacaaaaaatggcgcgtgtttgccccgtccgcagagtttcgcggcggacgtttttccgacactgacaacattatttatcaacggattagcggctggcgcgatctcatctggcacgagaaatcgcacatgtcgccgaataccattatcgcccctatcaccgaaacgctcttttatttcgataaagacaccattcaaattgccgagacagacacttccccgataatcatctttgcccgcgcctgcgacattaacgccatgtcgcggctggattatatgtatttatcaaatgggaataattccgattacagttatcaactgctacgggagcatattcgtttcgtccttattgagtgtgaagaaagcttcgaaaattgtttctgcgtctcaatgggtaccaataaaactgactgttatagcgccgccatgcgttttagcgatgagggcgcgcttgtcagcatccgcgatccctttatcgaggcggcgatacaagggctggggcaggaggctgactataccccctctttcgtcagcgaaaaccgggaaaccgtcgtcacgccggacagcgtttgccacgatccgcaaaaaattcgcgacattctcacccaccatccgctatgggacgcctacgacagccgctgcatcagttgtggccgctgcactaccgggtgcccaacctgtacctgctatagcgtctttgacgtcgcctatgatgaaaatccgcagcgcggcgaacgccgtcgccagtgggcaagctgcatggtgccgggctttagcgacatggccggcggtcatggttttcgcgaaaaacccggcgagcgtctgcgctaccgcgccctgcataaggtcaatgactacaaagcgcgcaacggcattgaacatatgtgcgtcggctgcggccgctgcgacgatcgctgcccgcaatacatcaaattttctttgattatcaacaaaatgaccgctgccgttcggcaggcgctggcagaggaggcataacgcatgtcacattgttcctgtcatgataaaccgcagcacagtttgctgcctgcggcgtaccgcatcctcagtattactcgccacacgccgctggagtggaatttccgcgtggccgtcgattttcccgcgcactgggggcaatttgttgaggtgtcgctgccgcgcgtcggcgaagcgcccatctccgtttccgactacggcgacggctggatagatctgctgattcgtaatgtcggaaaagtgaccagcgccctctttacgctgaaagaaggcgacaacgtgtggctacgcggctgctatggcaatggctatccggtcgatacgctgcgccataagcccttactggttgtcgcaggcggtacgggcgtcgcgccggtgaaaggcttaatgcgctatttcgttgagaatccccaggaaattggtcaactggatatgattctcggctataaaaatcgcgattgcgtgctgtacaaagaagaaatggcgacgtggcgcggcaaacataatctggtactcacgctggatgaaggcgaggctgatgaccgttaccagattggccgggtgaccgatcggcttgccgacatgacgcttagcgatatcgacactatgcaggccatcgtcgttgggccgccaataatgattacctttaccgtaaaaatgctgctgcaaaaagggctcaagccggagcaaatctgggtggactacgaacgccggatggcctgctccgtcgggaagtgcggccactgccgtatgggcgaagtgtatgtctgcaccgacggtccgatatttaactacgccgtcgcgcaacgttttgccgattaaggagaacatcatgagcattgatattgatatcattaaagcccgtgcgaaaaacgaatatcgcctgtcaaaagtgcgcggcgaagccatgatcagcgtccgcattcccggcggtattttgcccgcgcatttgctaacggtggcgcgtgacatcgccgaaacctggggcaacggacaaattcacctcactacccgccagaagctggcgatgccgggtatccgttacgaagatatcgacaacgtgaacgctgcgctggagccgtttcttcgcgagattgaaatagaactgtgcgacgtccaggttgaggataccaaagcgggctatctcgctattggcgggcgaaatattgtcgcctgtcaggggaaccgcatttgccagaaagccaacactgacacgaccggtctgtcccgtcgtcttgaaaaactggtctatcccagcccttatcatctcaaaacggtcatcgtcggctgcccgaatgattgcgcgaaggcgtcaatggccgatctggggattattggcgtggcgaaaatgcgcttcactgccgatcgctgtatcggttgcggcgcctgcgtgaaggcctgtagtcaccacgcggtaggctgcctggcgctgaagaacggcaaagcggtcaaagaagagtccgcctgtatcggctgcggcgagtgcgtgctggcctgtccgacgctggcctggcaacgtaagccggatcagctctggcaagtccgtctgggcggacgcaccagtaaaaagacgccgcgcgtcggcaagctcttcctcaactgggtgactgaagatgtgataaagcaggtgatcgttaacctgtatgaatttgaaaaagagatgctcggcggaaaaccgatctatctacatatgggccatctgatcgacaaaggcggctacctgcgttttaaagaacgggtactgcgcggcgttcagctcaatccggaagcgatggtcgccgaacgcatttactgggccgaagacgaatccgtcgcgcggatgcatctcaaacccgccgggcactaatcaaccacgccatggccgcagcccgcccacaggctgcggcacgctaaaccacatgaccagcgccgcgacaagcagtatgccccctccagccagcgccagcgttgaccagcctacctgccgccataacgccggcgctttgtttccactgagtttcaccgccagagcacgaaaagtgtgtaccagcaacgccagcgaggtaatcgttagcgaggttcccgccgccatcgccagtaccgacgccattccccagctaaaaacgccaatcactttactgaataacagcaccattatcgcgccggaacagggccgcatccccatagacagtacgatcatgaatcgcgcgcgccagtcatcgccgctatgcaattgttcctgcgtcggtagatgctgatgtccgcagccgcatttttcatggtgaacatggcgcggcgtaaaagcgataaagacaggtttacgtagcagcgcgcgtaacctttttatggcccgccagcacagcaaaatgcccagcccgccaactaacgcatagctccccttttccagccagaagccgctcagatggagctgcctggccggaagttgcaatacggtcagcacgcccaccaccaacccgatagccacgagcccctgtaataacgcggcggcgagggttaacacgatactcgatttcaacttcgaaggatgcgtcgccagccatgtcgcgatcaccactttgccgtgtcccggccccagcgcatgaagcacgccatacataaaactcagcagaagcaacgatccgcccgcccgctcaggatgcgtcgccaccgcgttaagcagcgcgctcaactgctgattcacgtcccgctgccaaagagcgcttttcaacatcacctgcggccaggcctgccacatccacagaccgccaaccagcatcagcagcaggaataacgccaatggccacagcgagagccagcgccgccccggagtgcgttgagaaaaaattactgacattgcaaggtcaccgtttgggcaaactgtttacctaaatccatatcctccggcggcgcgtcctctttatccagcgactgggcgaaacgtagcgtctcttcgccgggcgcaggagtataaacctgaatccgacacttttcgcgcagcggttccggcatcgtgatatcgctgtcctggtcataatgcatatcgacataataagagggatcaaacgttgaaaaggtataagtctgtccgcttaacggctgcggttcagccagcggtagcgtaaaggtcaataccgcctgatgcgcgtcacgcgtcataccgtattctgtcggcctgtttttaaacttcactttcgcgccattgcgccacacttctgtaaagtagtgctgcccaagtacgttagccatcacttccgccgccaactttttccatatttctgaccccggtgccgcgtttccggcgtcatacagcagatctgcggacgtcagcgcgtccattgtccagcgcatttttaacgccacaaattgctcattttcactgaccacctgcgtttgcagacggatgaagctgtgcggatgcgccgccgccacgaaagataaaacggcaagaaatagtgttaaggcgctgcgtttcactggcttcatctgttcctcgcgataaaaattctgtgacactcctcagcattcctggcctaaaagcacgcttatcacatttttcacacgcaaactttagctatccttaccagacaaactaacgggagacctgacagatgatgccgacaattgccccaccatctgtactttccgctccccagcgccgctgtcaggtattgctgacgcttttccagccggagccaattgccacggtggaaatcttcagcgcgcttaatggcgttgatgatgatactgcccgtgaggatatcactgagacaagcctggagatccagcgctatcatcgccttgccatcacaacatgccagaacggttgctatcggatcgaaggtacagcactcgatcagcgcctttgccttttacactggctcaggcgcggcctgcgtttatgcccgaccttcgtcacgcaacagtttaccccggccttaaaaaacgcgctaaagcagcgcggtatcgcgcgtccgctgtatgacgatattaatctgcacgcgctcatcaatctgtgcgcccgccggttgcaaaaaccatttgaacatcgcgacgtgcagttcctgcgtctctttttacagtattgtctgctacaacaccatgccggcatcaccccggaattcaaccctgtgcagcagatttgggcgcagtcgtgcgcggaatatccactcgcccaggaaattggtcgtcactggcagcgccacgtgatgcaggccgcaccgctcaatgaagcgctgtttatggcgttactgttttcaatgattcgcctccccgacccgattcgcgacacgcatcaacgggcgcagcaactgcgactggaggtggcgcggctggtgctgcgctttcgagaaaaagggaacgtacgcttcagcgacgaacaagggcttaacgatcagctgtatgtccatctcgcccaggcgctgaaccgaagtttattcacgattggcatcgataatacgcttccggaagagtttaaccgtctttatccgcgtctggttcgcaccacacgtgaggcgctcgccggatttgaagccgaatatggtatccacttttccgaggaagagacggggctggtggcagtgattttcggcgcctggctaatgcaggataacgatttgcatgagagacagatcgtattgttagcggataaaaatgatgcgctggagacgcatattgagcagcaactgcgtgaactgaccctgttgccgctgaatatcagacggatatcgctccaggcgtttcaaaaagagggatgcccgcgcggcgtagcgctgattgttaccccttacgccacgccgctaccgctcttctcaccgccgttaattcatgcggatcgcgccctcacagagcaccaacagcagcagatccgcaagatcctggaatcatgacgcggcaaccactttgggccgaaggaagatagcgggcaatgccaccagcgccataatccagaatacgccgccgcccagatgttgatacagaaaaccggcaaataccgtcataatcgcgatactgccgcccatcgccacagcggaatagacggcctgcaaacgaatcacctcgcttccctgacgcgcagcgatatagcgcatggcggccagatggcaaacggtaaacgtgccacagtgcaggatttgtatcacaatcagccacggcaacgccgtactccagcccatcagtccccagcgtaccacgccgcacacagcggaaagcaacagcaagtcgcgggcgctaaaccggcggaatagctttttactcagggcgaaaatgatcacttccgccaccacgcccaacgaccataaatagccgaccgccgatgctgaatagccagccccctgccagtagatggcgctaaaaccgtagtaggcggcgtgcgccccttgcagcaaacagacgcaggcgagaaaacgccaactttgtgccaccagcgtacgccaggcgggccagcctgcgctctcctgctgacggctttccccttgcggcggcacgctgggacgtaacaacatacccagcaacatcgaggcgacgccgagcgtcagtagcgccagaatcgcctggtaatcgtataaactcaccagcttaccggtcagcgccgaccctatcacgaaggcgatggacccccacagccgcacccgaccatagtccagggtaatttgcttttgccaggtattggccagcgcatcggtcagcggcaccagtggcgaaaagaagaggttaaacccaaccatcaccaccattagccacgcgacatgcgttcctgcccaaaatgccagcgcaaataccagcgtcagcaatgccaggacgcgcagcgcggagatcaaccgcgaaggatcgcttacgcgaggcgcaatgagcagactaccgagaaaacgcgcgaccagacccacgcccagcagaagaccgatggtttccggcgttagcccaagacctttgagccagacgctccagaagggcagaaaaataccgtaactaaagaagtaggtgaaataactgagcgccagccagcgcgtggaatgcaatgccatgattccctcccgtttggaggcgatagtctggcggtaaacggttgcgctggcaagggtaacataaggttaacaggcggagggagaagttcaaacggcaacgccgccggataatgacttccggcggcgtcacgttatggcgcataagtaatgcccgacagacgcagcgccatcgggccattttcacaacacaagcgcttatgcgtaaaccgggaagcgtgcgcagatatccagcactttcgctttcacgcgttcaatggtggcttcatcattgatgttgtccagcacgtcacacatccagccagccagctctttcacttccgcttctttgaagccgcgacgagtaaccgccggagaaccaatacggataccggaggtcacgaacgggctcttaggatcgttcggcacgctgtttttgttcacggtgatgttagcacggcccagcgcggcgtcagcttctttaccggtcaggtttttatccaccaggtccagcaggaacaggtggttctcagtgccgccagacaccactttgtagccgcggttcaggaacacttccaccatcgctttggcgtttttcgccacctgctgctggtaaactttgaactccggctccatcgcttctttcagcgctaccgctttaccggcgatcacgtgcatcagcgggccgccctgcgcgcttgggaagacggcggagttcagttttttatacagctcttcatcgccgcccttcgccaggatcaggccgccgcgcggacccgccagggttttgtgggtggtggtggtgacaacgtgagcgtgcggaaccgggttcgggtaaacgcctgcggcaatcaggcccgccacgtgcgccatgtcgacaaacaggtatgcgccgatgctgtcagcgatttcacgcatttttgcccagtcaaccacgccggagtaggcagagaagccaccgataatcatcttcggcttgtgctctttggccagcttcgccatctcgtcatagtcaattttaccggactcatcgataccgtaaggtacgatgttgtacagtttaccggagaagttaaccggggagccgtgagtcaggtggccgccctgcgccaggttcatacccagaacggtatcgcccggctgcagcagcgcggtgtaaacagcgaagttagcctgagaaccggagtgcggctgcacgttagcgtagtcggcgccgaacagttctttcgcgcggtcgatagccagttgctctacgacatcaacgtattcgcaaccgccgtagtagcgcttgcccggataaccttcagcgtatttgttggtcagctgagacccctgcgcctgcatcacgcgcgggctggtgtagttttcggaggcgatcagttcgatgtgctcttcctgacgtactttttcctgctccatagcctgccacaattcggcatcataatcggcaatgttcatttcacgctttaacatccgcatctcctgactcagctaacaataaaatttgtgcctgaaaaggcagtccgtgggacttcggccaacagtataaccgaatcattcttcgataacaggtcttgacaaaggtttttacgcaaacgattacctatgcgtcagataagggtttcctgaacgagagtctgacgaatttcaacggatttcttttcagctttgtgatgcagatttttcacgttgttacctccataacgtaaagcagagaagatccatttacaatgcaagggtatttttataagatgcatttgatatacatcattagattttcacataaaggaagcacgtatgcttgacgcacaaaccatcgctacagtaaaggccaccattcccctgctggttgaaacaggaccgaaactgaccgcccacttctacgaccgtatgtttacgcataacccggagctcaaagaaatcttcaatatgagcaaccagcgtaacggcgatcagcgtgaagccctgtttaatgctatcgcggcctacgccagcaatatcgaaaatttaccggcgttgctgccggcggtagaaaaaatcgcgcagaagcacaccagcttccagattaagccggagcagtacaacatcgtcgggacacatctgctggcgacgctggacgaaatgttcaacccgggccaggaagtgctggacgcgtggggcaaagcctatggcgtactggctaacgtctttattcatcgggaagccgagatttatcacgagaacgccagcaaagacggcggctgggaaggcacgcgccccttccgcatcgttgcgaaaaccccgcgtagcgcactgatcaccagctttgagtttgaaccagtcgacggcggtacggtggcggaataccgtcccgggcagtatctgggcgtctggctgaagccggaaggttttgcgcatcaggagatccgccaatattcactgacccgtaaacccgatggcaaagggtaccgtattgccgtgaagcgtgaagacggcggccaggtatcaaactggttacaccatcacgccagcgtaggcgatgtggtgcatctggctgcgccggcaggtgacttctttatgaatgtcgccgctgatacccccgtttcgctgatttccgctggcgtcggccagacgccgatgttagcgatgctcgatacgctggcgaaagaacagcataccgcgcaggtgaactggttccacgcggcggagaacggcgacgtccatgcgtttgccgacgaagtgagcgagctgggccgtacactgccgcgtttcactgcccatacctggtaccgcgagccgactgaggccgatcgcgcccaacgcctcttcgacagcgaagggctgatggatttaagcaaactggaagccgcgatcagcgatccagcaatgcagttctatctttgcggcccggtaggctttatgcagtttgccgcaaaacaactggtttcacttggcgtgaataacgaaaacattcattacgaatgcttcggcccgcataaagtgctgtaattgcaacaaatcctctgaaaaaacgggcgttatcgttaaggcgaacgcccgttttcctccccgttcccctgcttattgcgctgctttttatgcctttcttttacaaaaaaggggaataaaaaaagtctgtgcaaatcgtgttattattaacgtttgacttagctcgttagggcatctttttatgcagcaacctgttgtacgcattggagagtggctggttacaccttctgttaatcagatcagtcgtcagggacgccagattactcttgaaccacggctgatcgatcttctgatgtattttgcgcatcacccggatgaagtgttaagccgggataacattattgatcatgtctggatgcgcaccatcgtgaccaaccatgttgtcacccaaagcatttctgaactacgcaaatcattaagagatggcggagacagcaatgctgaatacatcgttaccgtacctaaacgcggctataagctgacggcgccggttatctggtgcgaagaaaatagcgatgagatcgataattcatcaacgtcgccgccgccgccgatcgcagcgacgaatgcagaaccgacggagggggttactgccgctacgcctgtgccgcccgcctctttgcaaacgccgactaaaaaggcgaaaaagccgcgtattgccgctttctggacgtgggtgatgttcctgctctcgctggcgacgctggtggtgtttatcgtgatgtcggtggtagatcataatgccgcggtaacaaaaacgcggttattacttaacccacgagatatagatgttcgttttgaaggcggcaattcctgtaataactgggtctcgcaggagtcctacgccatcggtctgggcggcttaatcaccgacctgctgaacacctactcgacttttatggtgcacgataaaaccaattaccgggtcaatgagccaagcagctccggtaagacgttaaccattcagtttgtcaatcagcgccactatcgggcgcagcagtgctttatgtctgtagtgctcattgataacgccgatggttcaaccatgctggataagcgttatttcgtcaccaatactaaccagttgtccatccaggatgatctgtttaatagcctgtctttcgttttaacacagccctggcctaatcgtatgcgagaacaactggccctgttcagaacgccgcaaaataccgcactgatgcgtttttatgaggcgcgccagcttattctgagcggcgatgcgcaggcgctaggtaaagccagcgatattctgaatggcattattaaggaaacgcctgatttcaactatgcctatgaatataaagtgctggtagatgtattacggcaatcacagcagccgtttgataaagaacaagtggccgcactgaacgaagagtttaaaaaaatagatcaaattccgggcgttgagaaaacgtctgtttattataaaatcaagaccgtcgatctgttaggcaaaggtgatatcgatgcagcgtatgaggaaatcaataaaagcatcgagcttgaaatgtcgtggtttaactatgtcctgttggggaaagtttacgaaatgaaaggtgagaatcgtctggccgctgatgcctatctgaccgcctttaatttacgtccaggtgaaaacactctgtactggatcgagaacggcgtatttcagacatccgttcagaaaattgtcccttatctgaatagttttctggcagaagattaaatttaacgctgaaccatgacaaataaaagcgaaaagatattaaatttttcgcttttattttgtgaaaaacatgttgccaaaaatagcttatgttaattttggcaacatattcattgcaaagatatgtaaatataactctttgtaattaaacgatgtttatcctttcatgatattttccatgatatttatatgttaattcaaaaaaatcaatctatcagttttttcatgtttgtgtttatttcactttttctttaggacttatctcaacccattcgttaatcttgtcgacagttgaacgggcacgcagcatatatgaagcataagcccggttcttaaaaatacagctcaggagaaatgaacatgagttctgtcaaaaagatcgggctatttgcctgtactggcgtcgttgccggtaatatgatggggagcgggattgcattattacccgccaaccttgccagtattggtggcattgccatctggggctgggtaatttctattattggggcaatgtcgctggcttatgtttatgcgaggctggcaaccaaaaaccctcaacagggtggccctatcgcttatgctggggaaatatctccggcgtttggtttccagaccggcgttctttattatcacgcaaactggattggtaacttagccatcggtattaccgcggtttcttatctttctacgttcttcccggcattaaataatccaataccggcaggtattgcctgtattgctatcgtctggctgttcacctttattaatatgctgggtggggcctgggtcagccgcttgacaacgattggcctattcctggtgctgatcccggtagtcttgaccgcagtcgccggctggcattggttcgatatcgcgacctatcacgcgaactggaacacgtccacgacgaccgactctcacgccattgttaaaagtattctgctctgcctgtgggcgttcgttggcgttgagtctgccgccgtcagcaccggcatggtgaaaaacccgaaacgcaccgtaccgctggcaaccatgctgggtaccgcgctggcaggcatcatctatatcgctgcgactcaggttatcgccgggatgttcccagcttccgttatggcctcttccggcgcgccgttcgctatcagtacctccacgattctgggtggctgggctgcgccgctggtttccgcctttaccgctttcgcctgcctgacgtctctgggctcctggatgatgctggtcggccaggctggggttcgcgccgccaacgacggcaacttcccgaaaatttacggtgaaatggataaaaacggtattccgaaaaaaggtctgctgttggctgcggtgaaaatgacggcgctgatgattctgatcaccatcatgaactccagcggcggtaaagcgtccgacctgttcggcgaactgaccgggattgccgtactgcttaccatgctgccgtacttctactcctgtgttgacctgattcgcttcgaagggttcaacatccgtaactcggtaagcctgatttgttctgtactgggctgcgcattttgcttcatcgcactgatgggcgccagctccttcgaactctccggcacctttatcgtcagtctgatcatcctgatgttctacggtcgcaaaatgcaccagcgccagaacaacgacagcgacaacaatacggctgaagcgctttaaccgctaactcctttttctcaaagcccctttcgtcacctgctatagcgtagcgggaggggcccactttaccaggaacaagactatgaacgttattgctatcatgaaccacatgggcgtctactttaaagaagagcctattcgtgaactgcatcgtgcactggaaggtttaaatttccgtatcgtctatccaaacgaccgagaagacctgctgaagctgattgaaaataactcccgcctttgcggcgtcattttcgactgggataaatataaccttgagctttgcgaagagattagcaagctgaacgagtatatgccgctgtacgccttcgccaacagctactctacgctggacgtcagcctcaacgatctgagaatgcaggttcgcttctttgaatatgctttaggcgccgcagccgatatcgcggcgaaaattcgccagaataccgatgaatacatcgacaatattctgccgccgctgacaaaagcgctgttcaaatatgtgcgcgaagggaaatatactttctgtacgcctggccacatgggcgggaccgctttccagaaaagccccgtcggcagcatcttttatgatttcttcggcccgaacacgatgaaatccgatatttcgatttccgtttctgaactgggttcgctgctggaccactccggcccgcataaagaagcggaagagtatatcgcccgcgtctttaacgccgaacgtagctacatggtgacgaacggcacctctacggcgaacaaaatcgtcggtatgtactccgcgccggcaggcagcacggtactgattgaccgtaactgccataaatcgctgacccatctgatgatgatgagcgacattacgccgatttatttccgcccaacccgtaacgcctacggtattcttggcggtattccgcaaagcgagttccagcacgccactatcgctaaacgggtaaaagagacgcctaacgcaacctggccggtccatgctgttattactaactcaacctatgacggtctgttgtataacactgactacatcaagaaaactctggatgtgaagtccattcattttgactccgcctgggtgccttataccaatttctcccctatttatcagggtaaatgcggtatgagcggcgaccgtgtggaaggcaaaatcatttatgaaacccagtccacgcataaactgctggcggcgttttcacaggcatccatgattcatgttaaaggcgacattaacgaagaaacctttaacgaagcctacatgatgcataccaccacttctccgcactacggtatcgtagcgtctactgaaaccgcagcggcgatgatgaaaggtaatgcgggtaaacgcctgattaacggctctattgaacgtgcgattaaattccgtaaagaaattaaacgcctgaaaagcgaatctgacggctggttctttgacgtatggcagccggaacatatcgatggagctgagtgctggccgctgcgttcagatagcgcatggcatggcttcaaaaatatcgataacgaacacatgtacctcgacccgatcaaagtcactatcctgacgccggggatgaagaaagacggtacgatggatgagttcggtattccggcaagtctggtcgccaaatatctcgatgaacgcggcatcatcgtagaaaaaaccggtccatacaacctgctgttcctgttcagcattggtatcgacaaaaccaaagctctgagcctgctgcgcgcgctcactgaatttaaacgcgcctttgacctgaacctgcgcgtcaaaaacattctgccggcactgtaccgcgaagcgcctgagttttatgaaaatatgcgcatccaggaactggcgcagaatattcataaactggtcgaacatcataatctgccggacttaatgtaccgtgcgtttgaagtgctgccgaaaatggtgatgacgccgtatactgcgttccagaaagagctgcatggcgaaacggaagaggtgtatcttgaagagatggttggacgcgtcaacgccaacatgatccttccttaccctccgggagtgccgctggtgatgcctggtgaaatgatcaccgaggaaagccgtccggtactggaattcctgcaaatgctgtgcgaaatcggcgcccactatccgggcttcgaaaccgatatccacggcgcctatcgtcaggcagacggacgttacaccgttaaggtgctgaaagaaaatacgaaataagtaccaaagggaagtggcttgccacttcccttttttcacgcagcaaggagactttatgaaaacaccctcacaaccgcgcgcgattttttacatcgtggcgattcaaatttgggaatacttcagcttttacggcatgcgtgccttactcatcctttatcttacccaccagcttggttttaatgacagccacgcgatcaacctcttcagcgcctacgcctctttagtttacgttacccctattcttggcggctggcttgccgaccgcctgcttggcaaccgcgtggcggttatcaccggcgccctgttgatgacgctgggtcatgtggtattgggcttagaatctgattcaacgttgagtttatatgcggcgctggccattattatctgcggctacggcttgtttaaatccaatattagctgtctgctgggcgaactttacgcccctgatgacaaccgccgcgacgggggattctcgctgctctacgccgccgggaatattggatcgatagccgcgccgatcgcctgtggtctggcggcgcagtggtatggctggcatgtcggctttgcgctggcgggcgtgggaatgttcatcggcctgctcatctttttaagcggtcatcgccactttcagcagacgcgcggtgttaatcgccccgcgctgcgggcggttaaattcgcccttccaacctggggttggctggtattaatgctgtgtatcgcaccggtattcttcaccctcctgctggaaaataactggtctggctatgtgctggccattgtctgcgtcttcgcggcgcaacttatcgcccgtattatggttaaatttcccgaacaccgtcgcgccttgtggcaaatcgttctgttaatgatcaccggcactctcttctgggttctggcgcagcagggcggaagttcgatcagtttattcatcgaccgttttgtcaaccgccactggctaaacatgaccgtccccaccgcattgttccagtcggtcaatgcgattgcggtgatggcggcgggcgtggtgctggcgtggctgagcagcccgaaagagagcgcccgctcggtgctgcgcgtctggcttaaatttgccgtggggctggtattgatgggcggcggttttatgctgctggcgctaaacgcgcatcaggcccggttagacgggcaggcatcaatgggaatgatgatcgcagggctggcgctgatgggctttgcggaactgtttattgatccggtcgcgatggcgcaaattacccgcctcaacctgcctggcgtcacgggcgtactgaccggtatttatatgctggcgaccggcgcggtcgctaactggctggctggcgtggtcgcgcaacaaaccacggaatcgcaaattagtgatacggcggtagccgcctacggacactttttctcgcaaatgggcgagtggacgctaagttgcgtggcgctgatcgtcgccattgtcggcctgagatgggtttgcacccggactacatcggcgctaccgcagggcgattaaacggtggttcgctgcccacaaggaggagacgggcagcgaatcggcacatcagatagccgcgtcgtcttcttcgccagtacggatacgaataacgcgggcgacatcaaagacaaagatcttaccgtcgccgattttccccgtctgcgcggtacgaatgatggtatcaacacaggtatccacgatgtcgtcaggcacaacgatttcaatttttaccttcggcagaaaatccaccatatattccgcgccgcgatacagctcggtgtggcctttttgacggccaaaacctttgacttcagtgaccgtcatgccggtaatacctacctcggccagcgcttcacggacatcgtccagcttgaagggtttaataatcgcatcaatctttttcatgctattccttgaaaaggtcgcctgtgttttgatcggttaaacgtaacatatttcgcgctactttacggcatgaaaactactctttgaaatcattcgcatccagttcgtgacgggagagtagcttatagaattccgtgcggttgcgccccgccatccttgccgcgtgcgtcacgttacctttggtaatttgcagtaacttgcgcagatagttcagttcaaattggtttcgcgcttcggcaaaagttggcagcgcggtgttttcgccttccagcgcctgctcgaccaacgcatcgctgatcaccggcgaagaagttaacgccacgcattgttcaatgacgttgaccagttggcgcacgttgcccggccagcttgccgtcatcagccgtttcattgcatcagtagaaaaggcgcgaacaaacggtttatgccgctgtgccgactgtctgagcagatgattagccagcagcggaatatcctcggtacgctccgccagcgccggaattttcaggctcacgacattcagccggtagtacaaatcttcacgaaattcgccccgcgccatcgccttcggcagatcgcggtgcgtcgcggaaataattcgcacgtcgatatcaatatcgcgattgctgcccagcggcctgactttgcgctcctgtaacacccgcagcagcttcacctgtaacggcgcgggcatatcgccaatttcatccagaaacagcgtgccgccttccgccgcctggaacaacccttcacgattgctcactgcgccggtaaaggcgccgcgcgcatggccgaataattcggactccagcaactgttccggtaacgcgccgcagttaatggcgacaaacggcttgttactgcgcgggctggcattatgaatcgcctgtgcgaaaatctctttcccggtgccgctttgtccgttaatcaatacgctgacatccgactgcgcgaccatgcgcgcctgttcaagcagtcgcagcatcagcgggctacgggtaacgatagcgttgcgccagctatcgtccgtcgcgggagcggactgctccagcgcttcatctatcgctttatataacgcgtctctgtcgatcggcttcgtcaaaaagctgaatacgcctttctgggtagcggccaccgcatccggaatagaaccatgcgccgtcagaatgataaccggcattcccggctgtactttctgaatttctgtgaacagttgcataccatccatttcgtccatgcgcaggtcgcttattaccagatccactttttcccgatgtagtacccgtagtccttcctggccgctctctgcggtcacgacgctgtatccttcactggtcaggcgcataccgagcaatttcagtaatccgggatcgtcatcgaccagcagcaggtgcgccggtttacggcttatcatggcgttacctcatcttgtgacggcgacggcgccgcgccatcttcagacgtcgcgggtttgtcattcgtatgcggcgtatcggcgttgtaattccctgccggttttcgtgtcgaaagctggcgctcaatatcggttaaactctccagcttacgggtggtaagatcgagctgcgtttgcaaggcctgttgctgctggcgcagcgcatccagctcactatctgacatttgctggagtttgctataacgctgacgttcggcagaaagcgccagttgcagcgcctgaccgtcatgccagatttggtagacgggccgtacctgagccggtatttgcgcgcttaacgcctccagacgggtcactatggcgcgccgctccggcggcgtaatttttgcatccgccagtaaaatcccgcgcctgaaggcattttgccagttatcatccgtcaacgcgcgcgcctctgcgcgcgactgaaccggcatcagacgatcggcgcagtcaatcgtgcgtagccagtacagcggattcgtctccaccgcctgcccgcgtagcgaccagatatccgcgcacgccgtcgggagataatccgccagttgataatgggggagcgtgtcctgcgctgcgctaccgggcagttgctgtgaagcatggggaacacatgcggtcagcgccagacacgatatgcccaccggtattccccaccgcaaaaggcatcgtttaatagtttggacgaaaacgtgtgacatacgcaccaggcttaaattcatattagtgtttgtcagatgcaggcaatggcagcgagatgcgaaaacaaacttcctgcgcgttgtcatccaccagttggatctctccctgcattcgacgaatacaatctctggcgatactcagccctaacccactgccttttaccgccccttttcgctggtggcttccctggaaaaaaggctcaaaaatcatttctctttcggtttgcggaatcggctcgccgctattaaccacatcgatataaaccgtggagccctgagagcgactacggatacaaatgttaccggattcagcgccatagtgcaccgcgttggaatagagattatccagcacgctcatcagcaacatgggctctgctatgcagcgttcggcctccaggtcgacatcggtatgcatcattttagcgcgggcaggcaaactgtgggcggaaaccaccatatccacaagcggcgcgatatcgaccgcttccagctctgtggcactgtctaccagtttccggttgtaatcaagcaattgctcaatcaatttttgtaaattacgactgctgtcatccagaatatcgaccacctctttttgctccggcgtcagcggcccaaccacctgatcggccagcagctcagtcccctcgcgcatactggccagcggggttttcagctcatgggacaggtgacgtagaaactgatggcgctgggattccagccacgccagacgctcactcagccagataatgcgctgccccaccgatcgtaattcacgcggaccggtaaaggtgacggtattccccaaagaacggccttcgcccaggcgattaatcatccgttcaattcctttcaccggcccgataatcatgcgggtaaaaagtagcaccatcgccaggctcaccagaaatagcaccagcgcctgccagccgaaaaattgtccgcgctcggcgatttcttgttgtaactgctgcccgcgcgagtaaaccacggtacgcgtcgcctgcaccatttccgtattcgcgttggcaaaggcctccaggcgcgcggccgctgccgcttccgggccgctatctttacactgcaattgcgccagcgcgtttaaatcctggcgtaacgcctgatacaacttatcatccggcaagacgccggcatgggcgtccagcatatcgctatagcgcttacgctggctttgatacacttttgccagcgtcggatcgtcaagcacgcaatactgtcggtagcttcgctccatctccagcgcgacgttggtcatcgcctcgctgcgccgggcgtcaataagcgtgctgcggttagtcaccgcagcctgatcgcttaacgcgttaaggctttgccacgcctgccaggccagaaccagcaacggcagcaggatcagcaaaaaggccagcatgaccaattgtcgtaaagaacgggggaaaacagaccagcgcttcaacgtgtcgctcacataaaagaagaataaaaaagatgctaaccgagggaagcgccagatacaacaaagccgggctaaacccggctttgttatggaataaggcggtgcctaactcgacgtttcgcccggaggttgataaagctacgctgttatcagaagttggacggcaggcaccttgttgtgcgtcattcgaagtttatgtagcgcgtccctaaggggctgacataagaaggtgaatgagccactggttaccattatgcagtaattgtgccaacattcaaaagaatttgttaacataatgatagatatgaaaaatatcgttattcatgctaaaaatggctctgtctgttttttgccctttctgtcgccaatcagcaacacctgcaacacctaaaaataaaacaatttaaaatcaaatagttaaatgtctctttttggcgacaacctatcccccactcatgtcgggatttcccgacactttaatcttgcggcataagcgctagtttattgccggatggcggcgtaaacgccttatccggcctaccgcttgacgttcaagacggtagctacaaccgcgcttccccgtgggcctgataagcgccgtctacaaaaaagcccctcgtgaagaggggcttaatggctatcgggctaattaaccaagctgcttacgcgcattacggaagatacgcatccacgggctatcctcgccccagttttccgggtgccaggagttggcgacggtgcggaatacgcgttccggatgcggcatcataatcgtcacccgaccgttttcggtcgtcaccgccgtgatgccgttcggcgaaccgttcgggttagccggataggtttcggtcaccttaccaaagttatcaacgtagcgcagagcgaccaggcctttgctctcaagcgcggcaagatgcgcatcgtcacgcacctcaacgcgcccttccccatgggaaaccgcaatcggcatctgtgagcctaccattccttgcagcagcagcgatgggctttgcgtcacttctaccaggctgaagcgggcttcgaagcggtcagaatggttacgtacaaaacgcggccacagttcgctgcccgggatcagctcgcgcagattcgacatcatctggcaaccgttgcacacgcccagcgccagcgtctgcggacgatggaagaaggtttcgaattcgtcgcgcacccgatggttaaacagaatggatttcgcccagccttcgcccgcccccagcacgtcgccgtaggaaaagccgccgcaagccaccagcgcatggaagttacccagaccgatacgaccgcccagcaggtcgctcatatggacgtcaatcgcgtcaaagcccgcacgatggaacgccgccgccatctccacgtgagagttcaccccctgctcgcgcagtacagcgactttcggtcgtgcgcctgtcgcaatgtacggcgcggcgatatcttcattaatatcaaacgacagcttcacgttgaggcccggatcggtatcattcgctttcgcctcgtgttcctggtcggcacattgcggattgtcgcgcagacgctgcatctgccaggtggtttccgcccaccagacacgcagtgtagtgcggctttcgctgaataccgtctggtcattagcggtaatcacaaagcgatcgccagccagggcctgaccaaggtagtggacgcagtcagcaaggccgtactgcgccaatagcgcttcgaccgcgtctctgtcttcagcgcgtacctgaatcacgccgcccagctcctcgttgaacagtgcggccagatggtcatcgcccagcgcggcaatatcgacctgcacgccgcagtggccggcaaaggccatctcggccagcgtcaccagcagaccgccgtcggaacggtcgtgccaggccagtaatttacgcgcagcgaccagcgcctgcatggcgtcatagaagcctttcagttgcgcgacgtcacgcacgtccgcgggtttgtcgccaagctgacgatagacctgcgccaacgccgttgcgcccagcgcgttgtggcccttgccgagatcgatcagcagcaaggcgttatcttccgttgaaagctgcggcgtaagggtgtgacgcacgtcttccacgcgggcaaacgcggaaatcaccagcgacagcggcgaggtcatttcgcgctgttcgttgccttcctgccagcgggttttcatcgacatcgaatctttgcccaccggaatagtcaggccaagctgcggacagagttcctctcccaccgctttaaccgcgtcatataaaccggcatcttcgccaggatgaccggctgccgccatccagttagcggaaagcttaatgcgcttgatatcgccaatctgcgtcgcggcaatgttagtcaacgcttcaccgacggccagacgggcggaggcggcaaagtccagcagcgccaccggcgcgcgctcgccaatcgacatcgcttcgccgtagtagctgtcgaggctggcggtagtgaccgcgcagtcagccaccgggacctgccacgggccaaccatctggtcacgcgccaccataccggtgacggtacggtcgccaatagtgacaaggaaggttttttccgccacggtcggcagatgcagaacacgctttaccgcgtcggcaatcgtgatatccgcgcggttcagcgcatcgcctttcgccttcaatgtttgcacatcgcgggtcattttcggcgttttgcccagcaggacatccagcggcaggtcgatcggctgattgtcgaaatggttatcatgcaacgagagatgctgttcttcggtagcgtcgccaatgaccgcatacggcgcgcgttcgcgcttacacagttcatcgaacagcggcaactggtcagccgcgaccgccagcacatagcgctcctgggattcgttacaccagatttccagcgggctcatgcccggctcgtcgctaagaatgtcgcgcagttcgaatttcccgccgcgcccgccgtcgctcaccagctccggcatggcgttggagagaccgcccgcgcccacatcatggataaacaagattgggttagcgtcgcccaactgccagcagcggtcgatcacttcctggcagcggcgttccatttccgggttgtcgcgctgaacagaggcaaaatcgagatccgcatcagactggccggaagccattgacgatgccgcgccgccgccgaggccgatattcatcgccgggccgccaaggacgatcagcttcgcgcccacgacgatctcgcctttctgcacgtgatcggcgcgaatattaccgatcccgcccgccagcatgatcggcttatggtagccgcgcagctcttcgccgttgtggctgttcactttctcttcataagtacggaagtaaccggtcagcgccgggcgaccaaattcgttgttaaacgccgcgccgcccagcggaccttcggtcatgatatccagcgcggtgacaatacgttccggcttgccaaaatcctcttcccacggctgttcaaagcccggaatacgcaggttggaaacggagaagcccaccagcccggcttttggtttcgcgccacgcccggtggcgccttcatcacgaatttcgccgccggaaccggtcgccgcccccggccacggagagatggcggttgggtggttatgcgtttcgaccttcatcagaatgtgcgcgggctcctgatgaaaatcgtaacggccggtattgtggtcggcgaagtagcgccccaccgcagatccttccatcaccgcggcattgtctttataggcagagagcacatagtccggcgtggtttcgaaggtgtttttaatcattttaaacagcgacttcggctgcggtttaccgtcgataatccagtcggcgttaaaaatcttgtggcggcagtgctcggagttcgcctgggcgaacatgtacagttcgatatcgttcgggttgcgccccagtttggtaaacgcctcctgcaaatagtcgatttcatcttccgccagcgccagaccaagacgcaggttggcgtcaattaacgcctgacggccttctcccagcagatcgacactggaaaccggcgcaggctgatggtggataaacagtttttccgcatcggttaaagaagagaacaccgtctccatcatacggtcgtgcagctctgcggccacttgtcgccactgttccgccgtcaacgtcgaagcctcgatatagtacgctacgccgcgctccagacgatcaacctgttgcaggccgcagttgtgggcgatatccgttgcttttgaagaccagggggagatggtaccaggacgcggtgtgaccaacaggagtttacccgccggcgtatggctgctaagcgccgggccgtattgcagcagacgggtaagctgcgcctgctcgctatcatttaacggggcgttcaggtcagcaaaatggacatactcagcgtatatattgtggacctggaggttggcagcctgaaagcgcgccagcagtttattgatacggaatgcagacagtgcaggcgaaccacgcagaatttccatcataagtctctcgtcttctaagctttggtgtgcgcaaggggggaaacggccgtcattataaagaatctgacgcgccgacgaaaccgtttgcgtagaaataaaatcaccgctttttcttgtcatacggtgcggctatcgttgcgaataagttgccaactggcgcattgttacgcaaaatgccgctcattaatgacttatctattgcagcaaaacatctttttcagcccgaggcaacgcacgatccagagaattaactaattgaaaaaattaaagattaattatctgctcatcggcatattgacgctgctgctggcagcagccctttggccctcaatcccctggttcggtaaaaccgaaaaccatatcgccgcgattcaagcccggggggtactgcgcgtcagtacgatcgactcgccattaacctattccgttatcaacggtaaaaaatatggtctggactatgaactggcgcagcagttcgccaactatctcggcgtgaagctgaaagtgacggtgcgccagaatatcagccagttgtttgacgatctggataacggcaatgccgacctgctcgcggctgggctggtctacgacagcgcacgcgttaaaaactatcagcccggccccatgtattattcagtttcgcaacagctcgtctaccgggtcggacaatatcgcccacgttcgctggcgaccgttaacgagaatcagcttaccattgcgccagggcacgtcgtggtcaatgatttacagcgtttaaaagagacaaagtttcccgacctgagctggaaagtggatgataaaaaaggctcgacgacgctgctggaagaggtcatcagcggcaaactggattacaccattgccgattcagtggcgatcagtctgtttcagcgcgttcatcccgagctggccgtggcgctggatgtcacggatgaacagcccgtgacctggtttagccgactggacgacgataatacgctctccgccgcgctgctcgattttttcaattcgatcaatgaagacggttctctggcgcggatcgaagagaaatatctgggacatggcgatgatttcgactacgttgatacccgctctttcctgcgagcggtagataacgtcctgccggagctggaaccgttatttaaaaaatatgccaaagagatagactggcgcctgctggcggcgatttcttatcaggaatcacactgggacccgctggcgacctcgccaaccggcgtgcgcggcctgatgatgctgactaaaaataccgcccaaagtctggggctgaccgaccgtaccgatgcggagcaaagcatcagcggcggcgctcgctatcttgaagatatgatggctaaagttcccgaaaccgttccggaagacgagcgtatctggtttgctttagccgcctacaatatgggttatgcgcacatgctcgatgccagatcgttgacggtaaaaaccaaaggcaatccggatagctggaccgatgtgaagcagcgtttgcctctgttaagccaaaaaccgtattacagtaagctaacctacggttacgcgcgtggacatgaggcttatgcttatgtggaaaatatccgtaaataccagataagtttggtggggtatttgcaggaaaaagaaaagcaggaagcggaagctatgaaactggcgcaggattacccggcggtgtcgccggaggagctgaataaagcccccttccccttcctgtcgtttttatcgcagtcatcaggctacctgacgcattcgccgtctttactgtttacgccgcagaagaaagaagaaaaatagcgcgatggtcttatcggatggcgacgcgcaacgtcttatccggcattgcgctatactgccggccccgcgccttccgcacggtcggctttcttcagagctttaatttcctgacgacgcatacggaaaaaatcactgagcagcgtcgcacattcatcgcgcaacaccccttcaataatctcgacccggtgattcattcccggatggtgcagcacgtcaattagcgatccggccgcgccagtttttgcatcgcgcgcgccaaagacaacgcgtccaatgcggctatgcaccatagcgcctgcgcacatcacacagggttccagcgtgacatacagcgtggtatccagtaaccgataattctgcaataccagaccgccctgacgcagcgccattatttcagcatgcgcagtaggatcgtggcggccaatgggtcgattccagccttcgccaatgacgcgatggttatgcaccaataccgcgccaaccgggacctcgcgttcgtcccaggcgcgtttcgccagcgtcagcgcgtggcgcatccagtattcgtgatctaattcgacatcagacaaagaggtaactccggtaatgaaagcgggcggcattatacacagacgctatgcgtttcactattcgagctgctgcaactcgccgtgcggcgtcacccgccagcgatgctggcaaaaataaagcagcgggttatcctgtttgctgtcgctgtagccgctataaagacgcagcggcgtaccgattttacgttccagttgcgcgactttttcatggcccagacagcgcacggttaatacccagccgccataccgtcgcgccatctggctggcgatgaggttaacgcgcggcagccacggcgtatcaaaatagacttgctctaccaatgattgcggagaaccggtaataagccagatatccgcgtcagagctcaatagataggtggtcagacgctcctgtacaaccggaaacgccgtgacgttagcgcgaaaccaacggacaaaatccgcctgatgcgcctgcaaacgcgtttcgctatggccaaaagtacagccccacaacaacagactcatcggccagcgggccgcacgcccttttaccagtaaaccgataccgataatgggcaacaacggcagtacgagcagcgcatttagcggctgacggcgcagcaaataacgcagaaaactgccgaacatatcctgttgatgtaacgttccatccaaatcaaaaaagacgacacgacgctcgtggctgaccaaaccttactcctctggatcattgaaccccagcagccaggtaaaaataaacccggcaattaccgctattaaatagcctaacagatagaacaggacttttccggcaacaattgttaatgccagcggcaaaccggaaataccaaaggtaattaccgtcgccactttccagtagctgatcaacgccccgcctaccgcgccgccgaggcaagcgccaataaatggcttacccaatggcagcgtgacgccaaaaatcagcggctcgccaatccccagcagtccgacaggaagcgcgcctttaatcacctttttgagtcgcgcattgcgggttttcatcagtacggcaatggccgcgcctatctgaccaacgcccgccatcgccaggatgggaaacagcgcgttatagccgtgcgcttgcaccagctccacatgaataggcaccagcccctgatgcagcccggtcagtaccaacggcaggaaggttccggctaacaccgcgcccaccagaaaaccgccgcgatcgatagcccaggacgcgccgtgagcgatagcgtctgaaatccagccgccaagcggttgcagagcgacaatcgctaccgcgccggtgataacagtcgtcaataaagggttaagaattaactccagcgaccccggcagcagcttacggaactggcgctcaatccagcacattaacgccaccaccagcaggacggcgataacgccgccccgtcccggctgaagcacctcgccaaagagcgtaatctgcgccagttgcgggctggaaaggatccccgccatcacgccgcctaacgcctgcgatccgccaaagactttcgcggtattgacgccaaccagaatgttcatgatagcgaacaccgcgctaccaaatatccccatcaggcccagcaggttaggataatggacggcaacatcgccgacgatatccggacgtttaagaatgttgataatgccggtaatcaagccggatgcgataaaggcggggataagcggtataaaaacattcgccagcttacgcaacgcatcgctcatcggcgctttatacttcgctttcgcctcggatttggtacgcgccatagcgtcatccggttttacaccacctgcggcaatctgcacgcgcatcgcatcaaccacctgcgcagccttccccggcccaacgatcagctgatgttgctccccttgctttacgtatccactgacgccaggcaacgcttttaagcgcggaatatccagttggctgtcgtcctgtacctccaccctgactcgcgtcatacagttttccaggcgcagaatattttgctctccgccgataccacgtaaaatgtcgctggcgagcgctgccgtcttatccatacacacctctttagtgttctaacgccgcccttaaaaagccctgatgagcggcaagtttttccctggcggctgcagcatccagccccgtaagcgccatcaaaatggcgggcttaacctcaaaatcggtctgtttcagcaacgcttctgcttcttcacgacctatcccggtcgcttcaacgaccatccgacacgcgcgatcgaccagtttgacgttggtggctttcatatccaccatcaggttttgatagaccttgccgaatttcaccatcgcgccggtagaaatcatattgagcaccattttctgcgcggtgccggatttcagccgcgtggagccggtaagcgcttccggcccgacaacgggcgaaatagcgatattagcctcccgcgcaataggcgaatctggattacaggagacggcaacagtggtacaaccggactgtcgcgcatagcgcaggccgccaatcacatagggtgtacgacccgacgccgcgagccccacaaccagatcctgttcttgcagatttagcgcgacaagatcgtcttcgcctgcctgttggctgtcttccgcgccttcgaccgctttcagcaacgcgcccggcccaccggcaatcagcccgacgaccagaccgtgcggaacgccaaacgtcggggggcattcagaggcatccagtacgccaagccgaccactggtgcccgcgcccatatagatgatacgtccgccagacttcagcgccgccgcagcggcatccaccgcacgcgcaacgtcaggcagagtggcttttaccgcttccgctaccagcgtatcctgttcattaaaacgcttaactaattcaggagtaggcaacgcatccagatccatcgtttgcgggttacgggtttcagacactaaggtaccaagattcatttttgtccctctggaatttttaattcataataagcgtccatgatggaatagaatattcccccaggcgagtgaaatttcgttttgtcgtcgccatcacgtttcgcaggagctgcccatgaactgtttgattcgtattcgccagcgttatccggatctcgcgcaaagcgacaggaaactggcggattatctgctcgcgcaaccggatacggcgcggcatctgagctcgcagcaactggcggctgaagcgggcgtcagccaatccagcgtagtcaagttcgcgcaaaaactggggtttaaagggtttccggcgttgaaactggctctcagcgaagcgttggccagcaatcctaatccgcattccgttcccgttcataaccagattcgcggcgacgatccgatgcgcctggtcggggaaaaattaattaaagagaatgtggcggcgatgcacgccacgctggacgttaacagtgaagaaaagctgttagaaagcgtcacgatgctgcgccacgcccgccgtattgtgatcaccgggattggcgcctctgggctggtggcgcaaaattttgcctggaagctactgaagattggcattaacgcggtggttgagcgcgatatgcacgccctgctggcgacggtgcaggcgctggcgccggaggatctgctgctggcgatctcttattccggggaacggcgcgagctgaacctggcggcggacgaaacattacgcgcaggcgcgaagatcctggccattaccggtttttctcccaacgccttgcagcagcgcgccacccgctgtctgtatacgattgctgaagagcaggcgacgcgcagcgccgctatctcctcgacacatgcgcaaatgatgttgaccgacttactgtttatggcgctggtacaacaggatttagagcgggcgccggagcgtattcgccatagcgaggcgctggtaaaaaaactggtttgaaaatggctcttccgcctcatgcagaagagctatcaagtttattgcgcttctttagcgtgaatcaattgcgtcaggagtttgttaaccggtacggcaatattgttctgagcgccgattcgcgcaatcgcaccatttaaatagtcgatttcggtcagtcggcctttatgtaaatcctgatgcatagaaggatagtggtggccgctctcacgcggatcgaacactttcttcaccgtattcatcaccatttgctcagtcaacggaatattctggctggcagcaactaacacaaactcatcaactaccgcttgcgctaaatctaaagcaccaggccgctgaccaaatccgccgacattacaatccagtaacgcgcaataggtgttcattacgctattaaaggctgctttcttccagatcgataataatacgtcagggcttatttcagcattcaatccagcactattaagggtggcaatgaccttagcctcttgagccgaatcctggctggctatcggctgcagttcaatcgttccggtaccggtggccataatatgcccagccccctccagttcgctggaccataacgtcacacccgcatagattttctgccgatcgacatatttctccagggtttcgatatttcccaggccgttagataaaatcatcacgaccttcgcggctggcagcagcggcttaatacgctgtaacatgctatccaactgcatggctttggtaaacagaataaccagctcaaactccccctgggattcatcagccaacatagcagggatggggtaatacttctgagtcgtttccgtttcgacaaacaaccccttgctacgaatagcgtcgacatgctcctgccagccatcaataagcgtcacgtcgtgcccggcctccagcagcatatagccaaaacgacatcccatagcgcctgcacctgcgattgcaattttcatttttatttccttattatctgattaatgaattttggctaaaaccgttgcgacatattttttcgttatcagggtcaacacgactccaataagcaatagcaccgttgtcaaaataaatactgtattgtagcttccggtatattttgcaatagcggacgtgacgtaaggagcaataaccgcaccgacggcaaaaccaaaatacataaagccgtagtttagtccctggttacgcataccaaaattctggctggtcaagccagggaagataactaatataccggcataagcaaagcccacgcccagagcgctgaaatagaataccgaagtattaccgttgaagaacaacagcagcagcatacagacgcaggtaaaaagataaacaataaccagcgtattatagccgcctaatttatcggttaaccctccccagaacaggcgaccgatcgagttaaatatcgagaccaggctaacgactaatgcaccggacagtaaaccgtactgcgtcataccaatttgcgcagaacttgagctaattaccatcccagagaacacgcccagcgccagaatcataaacagcagccagaagcgcagatctttcagcatgtgccgatagtctttatccagtggcgaggctttaattcctccgctatcttttgctggcgcgctacgaataaagagctggacgataaaaataaccaccagataaacaatacccagatataacaacgcccgactaacatcatgagtttgcgccataaaatattcggccaggcgggtgcaaagtagcgttccgacgccaacacccgccagtacgataccgctggcaagaccgcgacggtcagggaaaaatttcagaatattattaagattacccgtaaaagccaggcccgatcccaacccggcaatgacgccgtaggttaaaaacagcatgggcaaattatccacaaacccggacaagataaaacctaaagaaaacaggataccgccgataactatcgcctgctttcctttaccattgtcgatcattctcccaccccaaatcatcggtaaaggaatgatccccatgttgatagagaatgctaacgccagcgtagccggatcccagtgatattgcgccatgagtggtgttttgaaatagctaaatgcgtagacgcccccgagcacaaaattgatgcacacgtgagcggcaagcattccccagcggttgattgatgccgacataattttccctttttaaaatgcactgatcacagtttaaaaaaagcaaaataggcaaacaatttggtattttttataatcgttataacaaaacccaatcgattggcattaaattttaatgaatatcaaacaactacattccttcctgatattgtgtgatgaattacattatggtcgggcagccagtcgcctgtttatcactcagccatcattaagtcagcaaatcaaacaacttgagtcatcacttaaaacaatattatttaagcgaaaaggtagaggaattaaattaacaaaagcaggcattattttgcaacgacacgctaacaaaataatgctggatttaaaaaatgccgaaaatgaacttcttccctatcaggatcaacagcgcgatactatttcaatcggggtgtcaggcagctacctggtcctgcccgcttttcgcaactttatggcgcaccatccggaaatatctttaaatgttaaagagttctcaactgagcaaaccattaaaaagctgacggatagcgccgttgatattggcattgtttatcgaacagcgctccctgcccagctaagctcgaccatgctgtttgaagatgaaattatcgctgcaatcccactttctcatcctctggcgacacgcgaacgtctgcatctaaaagatttaaacgaccagcccattatcgtgcttaatgactctctgctattaagagggatcatcaccacagaatttaataaccgcaaagtcgttcctaacgtcatctgcgaactggataaccactactcatgccttgagtatgccgaagcgcagattggcatcgcatttattacccgctcgctaacccatttatcgacacccaaaaatgttcgcctggtttcactgggcatccccgcattctttattcctgtcatgctggtgcacagtaatgacctttcactggataacgcaaccatctgcctgctcaagcagatcaaaaatttttacactgtagataacaaatcagcgccagaaaagagctggcccgagcagaaaataggcgtataatgcccgcccgatttgtgttgtttctgagaatttcctgatggcgctgttaatcaccaaaaaatgtatcaactgcgatatgtgcgagccggagtgcccgaatgaggcgatttcaatgggcgacagcatttatgaaattaacagcgacaaatgcaccgagtgtgtaggccattacgaaacgccgacctgtcagaaagtctgcccaatccccaatacgattttgcaggatcccgcccatgtcgaaagcgaagaacagttgtgggataagtttgttctgatgcatcacgcagataaactgtaagcgggttaacgtatttccaacgcaacaatgtctgatggcgctatgcttatcaggccgacaatatatcggcctgtaggtcagataacgtgtttacgccgccatccggcaaatctaactttccagaatgaccgtagcgcaggcgtaatggcgttcatcggccaacgtgacatgcatgtgcgccacaccgagtttttccgccagcgttaacgcctcgccccacagccgcaaacgtggttttcccagctcatcgttaaacacttcgaactgattgaacgccagaccgttgcggatgccggtgccaaaagctttcgctgccgcctctttgaccgcaaaacgcttggcgagaaaacgcaccggctgctgatgcgtctcccagatagcccactcgttgtcactgagcacacgccttgccagacgttcgccggaacgggagatcactgcttcaatgcgggcaatctctacaatatccgttcccaggccgagaatcgccattagccgcgcgcttccagcatcaaacgtttcatttcagccaccgcctctttcagccccgtcatcactgcccgaccaataatggcatgaccgatattgagctcgtgcatttccggcagtgcggcaatagctttgacgttatggtaggtcagaccatgacccgcatttacttttagccccagacgggccgccagggtcgcggcgctggcaatacgcgccagctcttttgcctgttccgcatcggtttctgcgttggcgtagcagccggtatggatttcgataaacggcgcgccgacttccgccgccgcgttgatttgcgtttcatcggcatcgataaagagcgaaacctggatgccagccgccgccaggcgcgcacaggcatcacgcattttatcgcgctgtccggccacatccagaccgccttcggtggtgacttcctggcgtttttccggcaccagacaacagaaatgcggcctggtttctacggcgatcgccagcatctcttcggtcaccgccatctccagattcatacgcgtatgcagcgtctgacgcagaatgcgcacatcgcgatcggtaatgtggcgacgatcttcgcgcaggtgtacggtaatgccgtccgcgcctgcctgttcagcaataaacgccgcctgtaccggatccggatagtcggtgccgcgcgcattacgtaacgtggcaatgtggtcaatattgacgcctaacagtaattcagccatgacaatcctcgttaatctttcttcgtttttactgtgcgtttgggcataaattgccggaacagctcccggctttttaacggttttcccccaagatacggctttaatgccatacgggtaaagcgtttagcggcacgcagggtatctacatccggaaattcccgcgcctccagcgctttcaggtgccgtccggtaaaggtgttgttatcgatgacgacgctggcgaaaaagcctttttcttcgcggtaacggtaggtcatggtgtcatccacccgttcgccgctgcctgcacagtgggtgaaattgacgccataccccagatgacccagcaacgccagttcgaaacgtcgcaacgccggttcaggcgagccggtggttcccgccagcgcctgaatacagttcagataatcaaaaaagagttcggagaagcgcgtttcatattccagtacgcgagagaggagttcgttgatatacaggccgctatagagcgtaataccgcttaacggcagcgccagagaaactgcctcggcgctgcgcagggttttcacctcgccgcgtccgctgtagcgtaacaataacggtgtaaaaggctgtaacgcgcctttcaaattggaacgtttagatcgcgcgcctttggcgacaaggcgcactcgccccgattcttccgtgaagacgtccagcatcaggctggtttcgctccaggggcgactgtgcaggacaaatgcgcgctgccacccttccacgctgtgttaactcacagatcgtctacgtaaccgagactgcgcagagcgcgttcgtcatcggcccagccggatttcactttcacccacagttccaggtgtaccggcgcttcaaacatctcctgcatgtctttacgcgcttcaataccaatggttttgattttggcgcctttgttgccaatcaccatcttcttctgcccttcgcgctcgacgaggatcagcccgttgatatcatagccgccgcgttcgttggtaacaaaacgttcaatctcaacggtaacggaatacggcagctcggcgccgagaaaacgcatcagcttttcacggatgatttcagacgccataaagcgctgagagcgatcggtgatgtaatcttccgggaagtggtgaatcgcttccggtaaatgtttacgcacgataccggcaatggtatcgacgttcatacccgtttcagcagagatcggtacgatatcaagaaagttcatctggcttgccaggaactggaggtgcggcagcaaatcgactttttcctgcacgttatccaccttgttaacggcgagaataaccggtgctttgccatcgcgcagtttgttcaggaccatttcgtcgtccggcgtccaacgggtgccttccacaacgaaaatcaccagctcaacgtcgccaatcgaactgctcgccgccttattcatcaaacggttaatggcgcgcttttcttccatatgcagacccggggtatcgacatagattgcctgatacgggccttcggtatgaataccgacaatgcggtggcgcgtggtctgcgctttacgggaagtgatcgaaatcttctgcccaagcagtttgttcagcaaggtggatttgccaacgttcggacgtccgacgatggcaataaatccgcagtaagttttgtcagtgctcattccaactccagttttttcagcgcctgttcggcggcagcctgctccgccttacgacggctggaacccgtgccaaccaccggttcgctcaggccgctgacctggcagtggatagtaaattcctgatcgtgcgcctcgccgcgtacctgcacaaccaggtaagatggcagcggcagatggcgaccctgcaaatactcctgcaagcgcgttttcggatctttttgtttatcgcccggacttatctcatccagacgggttttataccagttaaggattaactgctcgacggtctggatattactatcgagaaatactccgccgattaacgcttcaacggtgtccgccagaatggactcccgacggaatccgccgctttttaattcgcccggccctaaacgcaggcactcgcctaaatcaaattcacgggctaattccgccagcgtattaccacgtaccaacgtggcgcgcatacggctcatatctccctcatccacccgtggaaaacggtgataaagcgcgttagcgataacgaagctcaggattgaatcgcctaaaaattccaggcgttcgttatgtttactgctggcgctgcggtgagttaatgcctgctgcaacagctcctgatgattaaaagtgtagcccagcttccgttgaagccgattaattacgatggggttcatgcgataccaataaatgaatgcgtcaacaatccagcacacgaaacagacctgatacacgtcatctgtcctgccgcatcgctgcagcggaaagaaggttgtctataaccaacgctgtttcgtgtgccgtggcgaccaaacggcgccaacctaaaacttcgggggaatattctatacacaacgacaggggatgtcgttagtcttagggaatttatccaggaaataattcacgctgccgctaaaaagacggcagcgtgaacgatcatttcatcacagttagtgaataccgccgatacgactcaggcgtacgcctgtcggccactccccttcctgcttgtcaaagctcatccagatagcgaccgctttaccgaccagattcgcttccggaacaaatccccagtaacggctatccgcgctgttatcgcggttgtcgcccatcatgaaatattgtcccggcggtacaacccaggtcgccagcggttgtcctggctgttggtaatacatgcccaactgatcctgagctatcggcaccatcaggatgcggtgcgtcacatcgcccaacgtctctttacgttcggtcaggcgaatgccgttttctttcgtctcgtttagcggaacttcaaagaaaccgctggtcgcttctccgccgttacggcgggcaaaagtctgtacaaaatcgctcggctcaacgttagagtaggtaaccggcagcgcattttcgcacgcctgaccggagctacagccaggctgaatcgtcacctctttcgcaaccggatcataagtgattttatcgcccggcaaaccgacggcgcgtttgatgtaatctaacttaggatcttccggatatttaaataccacaatatccccgcgctttggatgaccggtctcaatcagggttttctggtagatcggatctttaatgccgtaggcaaatttttccaccagaataaaatcgccgataagcagtgtcggcatcattgagcctgacgggatctgaaagggttcataaagaaatgaacgaacgatcagaacgatcgccagaaccgggaaaaccgacgccccagtctccagccagcccggcttaggcgccactttattgagcgtagcgttatccagcgcatctcccgacgccgtttgcgcggcagcctggcgcgcccgacgttttggcgcgaaaacaaacttatcaacgcaccataaaatgcccgtcaccagtgtggctatcaccagaatcagggcaaacatgttcgccatgccaactccttagggattatttattgtctttaccgacatgcagaatggcgaggaacgcttcctgaggcagctcgacgttaccgatctgcttcatgcgtttcttaccttctttctgtttctgcagcagttttttcttacgactgatatcgccgccgtagcacttcgccagcacgtttttacgtaactgttttaccgtcgaacgggcaataatatgcgtaccaatcgccgcctgaatcgcgatatcaaactgctggcgtgggatcaaatctttcatcttctccaccagctcgcgaccacggctttgcgagttatcacggtgcgtgatcagcgccagcgcatcgacacgctcgttgttgattaacacatcaacacgcaccatatcggaagcctggaagcgcttgaagttataatccagagacgcatagccgcgcgacgttgatttcagacggtcaaagaagtcgagcaccacttccgccatcgggatttcataggtcaacgcgacctggttaccgtgatacaccatgttagtttgtacgccgcgtttctcaatacacagcgtaataacgttacctaaataggcttgtggtaacagcatatgacattcggcgataggctcgcgcagttcataaatgttattcaacggcggcagcttggaggggctatcaacatagatagtctctttcgccgttgtttctacttcatacaccacggtcggcgcagtggtgatcagatccagatcgtattcgcgttccagacgctcctgaatgatctccatgtgcaacaggccgaggaagccgcagcggaaaccaaagcccagcgccgaggagctttccggttcataaaacagtgaggcatcgttcaggctcagcttgccgagcgcgtcgcggaaactttcataatcgtcggagctgaccgggaacagacctgcatagacctgcggtttcaccttcttaaagcccggcaacgctttttccgctgggttacgcgctgaggttaaggtatcgccaaccggcgcgccgaggatatctttaatggcgcagaccagccagcctacttcgccgcacttcagctcggtacgatcaacctgttttggcgtgaagatccccaggcggtcagcgttgtaggtctgcccggtgctcatcactttaattttgtcgcctttacgcatggtgccgtttttaatacgcaccagcgataccacgcccaggtagttatcgaaccaggagtcaataatcagcgcctgcagcgggccgtccggatcgccttgcggcggcgggatatcgcgcaccaggcgttccagaacatccgtcacgccgacacccgttttggcggagcagcgtaccgcgtccgtcgcatcgataccgacaatgtcttcgatttcttccgccacacgctccggatcggcggccggcaggtcaatcttgttaagcaccggcaccacttcaagatccatttccatcgcggtgtagcagttcgccaacgtttgcgcttctacgccctggccggcatccaccaccagcagcgcgccctcgcaggcggctaacgaacgggaaacttcataggaaaagtcaacgtgtcccggcgtgtcgataaagttcagttgataagtttcaccatcagacgctttaaaatccagcgtcacactctgggctttaatagtaataccgcgctcacgctcaagatccatcgaatcaagtacctgagcttccatttcacggtcagacaggccaccgcagatttggataatacggtcagacagcgtcgatttaccgtggtcaatgtgagcaatgatggagaaatttcttatgttcttcataaatatgaatttttcaactcgctatgctgataaatttttcttgatggacacagcggtggacattccacaataactaccccatcaacgactggcgtgcatattacactgtagctttgaaatcgtcagcatacgatctgctgatcaacatacgatgttacatcacaatagaggtctatacgatctataaacctataaacacggttacagtcagtcctgactaaacagcagccggcctaccgcagtcacgttcttgcagacaacgtgactgcggtaatccatcccaccggattgtcttcaaattctccatgttgctgaatcggctaacagcttcttaaacgatcggtattaggctaggttctaaatcttgcctgaatgaaaataaatgtaataatgatagcttggtattgacatatagattgaaaaagcgcatgaaaataggattccaaccagccatattgcaatatgcatatacaagtaacgaggcgacatcaaaccttgagttattaaataaatggagaatagaatccccagatattgagaaggaggagcgtaatagtatttacgacaaaataatagaagcaaatcataccgggagcttatcaattactgctcatcatgttacctctattccggtatttcctgataatttatccgaattgaatttatcttcatgctatacactggagtctattccaaatcttcctgatgggttaaaaagtttaactatatctggaaatcagaccattaaaatttcatatttcccagatagcttagagtcactatctatagatatgcaggcatatgaagaaaattatactttccccgcattaccttatggattaaagagttttactgcatgctatggtaaatttttgcctccccttcctccgcatctatcttctttgtcattgcaaaatttctctgaaatattatgtgctgagttaccatataaattagataaattagatttacaaaattgccctttcttgccattaatgaaaatgttacctgaggagttaaaagaactaagtattgaacttatacgaacagttcccggtactgttatagatgatattttgcctgataagctaaaaaaattaagtatcaacttttgtgataatattaaacttccagttaagcttcctgttaatttaaagtctatcaatttatcctcaaggacccctattgcatgggaaataccaacctgcaatctgcctgcacatatagatattagtaccgatggttatgttaagcttaatcctgaatttcttaccaggagtgatattacctttagtaacaaacctgcaggagatgtgttaagttttcagcctggagatgtggtttatggtttatgtaaggcaagagatcgagtaaatactttagttaattcgttatattatttttcaaaaaaagatattattattcaaaatacattaacagatgcggtctgggacaggaagaatagagccgtgtttaataaagatgagaagatagcagaaagattgaatgatgttcagagagggattttttttagagaatttttatctcaacataaaaaatacaatattaccgaagataaatattcagacttatccaatgaggagtgctggataaaaacaagtaaagccggtcttgaatttcaaacacgattgagggaacggtcagttatttttgtcattgacaatttagttgatgctataagtgatatcgcaaataaaacaggaaagcatggtaattctattacagcacatgagctaagatgggtatatcggaatcgacatgatgatctggtaaaacaaaatgttaaattttttcttaatggtgaggctatttcacacgaagatgttttttcattagttggttgggataaatataagcctaaaaatagaaatcgttgactttaaaaaaatatgcaattaatatatttatatatagagcagccctattggagttaaggatatatactccccctaactctagactacatgccaactttacttagtatcatattttcttgctacatatctgtttggcaagggtatgaataaaaaacaagattaatttaattgatatcgcaacagataagcacctgcatttatctttaaacttttttatggccaaccagatttttcaccatctgcgcacgtttattcgggcatgcgttgaaaacctgcaaaaaaagaaaaatatcgatgcttattattttttctttaattaaattttcgctcaacaaacttaattattaatccaatgacagtgaagtgtgaactatgctgagcataaacgacatcaatagcaagggcaagggcaagggcaagggcaagggcaagggcaagggcaagggcaagggcaatctgagtatttacaggtgaaattatgaaaaatagtatatttttaccattgcttctggtgctgtcggcaacgaccttttcggcattggtgatggctgccagtcattctccccaccagataatacaaaacatttttccagtggctggccgccagatatcctgaagcaactgaattggtctcaggtttgtggttgttagtatactgaatattacttcaggatggcatgttttattgacaccagcctgatttttcacaacgttatattacccgtttacagataattcccagctaataaatcaggaagttccagatgtaacagaagttatgaggtgtattaattgataggtctaacaggcttgaattacttttctttaaaaactactgcatgtaaaagggtctcctcttgttgtgatgagattcgtatatatttatatcttagtgatttatggatcatacttgtggttttccttaggaggtaacatgtttacaattaatagtactaacagggtggcgagcacaatcgctccatatgcatgtgtaagcgatgttaatttagaggacaaggctacatttttagatgaacatacctcaatacatgcgaatgattcttctttgcaatgctttgtcttaaatgatcagcatgttccgcagaatacattagctacagatgttgaaggctacaatagaggattacaggaacgtataagcctcgagtaccagcccctggaaagcattgtttttctactcggcacccctgcagttttagagactaaagagtctttatcattaccagtttccccggatgctttaacccaaaaactattaagcattagtagcaatgatgaatgtaaattatcaggtagcaccagttgcactaccccagccagtcataacccaccgtccggttatatcgctcaatacaggcattctgcagaggttttcccggatgaataaaacaaagcgttataaatagctgcgccgaatagtagatcactttgattgaactcagtccggattgtgtgatttgatcaatcgccaaaaatcacaaatcaccaaccggactaagcgatgccgatcatagcaccaattccccgtaccgaacgacgcctgatgcagaaaactatccataaaacgcgtgacaaaaaccatgcccgcagactgactgccatgttgatgctgcaacccgggagacagtatcggccacgttgccagaacgctctgctacgcccgttcacccattggacgctggattaactgattcaccgctgacggtgtggaggcgctggacaagtgtgatgcggataatcctcatcatatggtcatgtatttttcataaacaataaagctcgtccaggagtgcactaaataacagattgttagagcttgcttaaacatcagtcgtctaagtttaccttaaagcaagtggcgttttatgtcccatatatgccccatcacatcctcgttccatcatcaaactcactggatctcatgatgttgtagggaagtaagccggagagataatttccttctgtgccgtgccggcagaagaatttatctggcacgctgtctcgcgctgtatggagtgtgaagagccaacacccggaattgattgaacaagttacttaacacgcaatagctcagagtatcttgtggtgtaccgcagcgaaagtatttctcgcttcatagcccactgttgcggtatcccctgcccggtgattttctggttgtattgtcatgtgcgcatatttaagccagtttagagactgggaattttctgtacagcgtcgacagccccgcatcataaataatcgttacctgctgtcgcggtactcctgccctaatcaggcgcccggcctgcgctcccagtggatgggagccagtaaggatttgaatagcacatgaactcactctcatatgaattaatttacattggaaagaaaatataatagcgcttatcatttttatttaagttaaatattttataaatggtttttatttactcacctgatggtaatgaataacgtttaatatctatagtaaaggatgctgtaaccgtaaggatagtgtgccaaaatttaacaggcaacgtattattaaacacgttaagagcgtatttttagcaatgattttaatattaccatcttcactatattctgctcttacaatagcggcagactctcaagatcataaaaaagaagaaacaattaagccaatgcctcaaaagtggtgtaatctttggcctgctggcatacccttccctgaagattggtttaaaatgtgtagaggttattgagtataaatttaatatactaaccagtaaccatatcagttatgacagacaggtcttcttcatatttgctataaataaggcctgagctttcctgacaaattataaactactggctggtttctccggccagacaggctttaaagtatcaacacggtttacctgtacccggtactttctccatgccagaagagaagctttttctttatcggttgcttcgtccagatccactgcatcctgtaacggcgcgattttttcagatgccatttgcaaaagacggcttttggtcccttcagcttcacgaagtctggccgctgtttccgcagcttcatccttcacccacgccttaccatcccatttctggtattcaccgtctggtgaaactgatgtgacattttcaggtagcgggccgggagcggaaatataaacctgattgccggttgttgtgtcgtaaaccgtctcgccgcggtggtcctcatgcagactccacgttccggtttcagcatcaaatatcgcaatatgactggctggaatatccgggggcgcaatatccgtacaatttgccggtaatccagtgtgtggcgggatatatgcatcacctgcaccaataaattcgtttgtatctgaacgcagattaaaaattttaattgtctgcggggtatcgctcattttaaacgtcattttttactccggataaatattcaggtttcaggtgctttccatgagaattggggctaaggaaaacagcatggctatgcgcaccaatataaatatcatcaacctgatgacggggactgatgcaggtgttacctgattttttgcaatacgttctgtaatcaccaaaaccgatatattccgttctggcgttcggacaaagcgcctttgacggacagtatgccgttgtactgaatacagcattctggcgggcgctggcgtattgccagttaatttccgtggtgcagttaataaaaccatcccacgccagcttcatttgccgggcgacactgcccggggatacctgaccacacccggcccccatcgcagggaatactaccgatttaattttcctgtcttccccggcgcttttattgtgctgaaatatcgctaataacgctgcacgtgttgcattataaaccgcgtcggtgccgtcgattatcagcggaacgcgcatcgtcggggcgtgaaccagccacggatatttactgttacccgtttcaataacaaaggcggtgccgacgggctgttctcccagatattcacggaggatatgttgctgtacccgttcctgtaattgcggcccgaaatatgccgtaatagcagcatccacaccaccatccataagaccaaagctgttggccgcactgaccatgcagtcaaattccggtatggtttcaaacggtccggggataatttccacattttcggtattctgaaaagaatgttcaaaagccacggccattgctggcacgggtgctgaaagaattaatttaatcatgccagcctcactatgtagttaaatgcaatatttttaaccgtggtttccgcattaccgtctgcgtccacaataacgacgtgaccgtgtggaccgatatacatggtgtgctcgtgtcctccgatataaactgtatgcgcatggtcgccagcggcctgtgtccatgcaccacctccaggctgaaatgaggtgtgattggagtctccccagtatgaattgatataaccgccgaactggtgagtatggttgcccgtggtattggtcgatttcgtgccgtaatcaaaagatgaggtagattttgtccctaagtcagtatcctgcgcccgcgcggtgtgcgagtgcgatttattgccgtccatttcttgcgacaatacggcacgtccactgatgggcttaccctttattgtccagcctctcatgtcagggataacgccggacggatacgctatagccagtaacgggtaagcagatttatcgaaggactgcccctgcatcagagcgtaacctgccggagtagcatcagatggccatgcaatcgccgcccctactggatgcgaatccggaggtgggtttagtgtggtgtaaagcattgcccattcggaccactcagcatcggcggtatctcgatggctgcgaatatatgcgggcgctggcgcaccatttgtcccgctccagccaatgaggatttccccatcaccggttccggtcagacgtaaaatatttccgtattgcgtcggatagccattgttgtagacctcgcccattatcaggccgccatcgctgcctcttgtcgtgccagtcagtgccggaagcgcgccgcgtgatgcaagcctgttcgctgcgacagccgtaccaccagcaggcaacgcaccagcagccttatcaattgtgctccgtaaaccaacgtattcgataagaccttcaatgctttttcctgacagcgccgtcagtgtatcgtccagcggctgcttgcccgcaatcatgttagtgatagtggtagcaaaattaggatcgttacccagcgcgtcagccagttcctgcagcgtatccagcgactcaggtacggaaccgaccagtgcagcaatcagtttacgaacaaactcagcgtttgcagtctgaagtcccttagcgtcatctggcggcgtcggtgtggtcggcgttccagtgaataccggactgtccagcggcgctttggtctgtacctcgtccatgacagcatggaccgcctttggcgtggctgccagcgcttcgctgtcactgtccgtggcgctgcttaacttaacgataccttttttcgtcaggctggcatcttccagggaaatcacgtccgcgatgtcttctgcccgttttgcggcatcttctgctctggtggctgctgctccggcagcagtactgctttgcgccgccagtgatgcgctggtatcagatgcggcggcgtgattggatgcctccgatgctgatgacgaggcggctgttgcgctggccgctgctgtacttgctgacgttgcagcgtttgtctcagatatttttgctgcggctgccgatgcggctgccgccttttccgacgctgccgccgcagtggctgacgcacctgcatcaccggcactggaagccgcctgcgtttctgacgtcttcgcggcggtttcggatgctccggcgcgcgctgctgatgtctgcgccgccgtcgcgctggcggctgcggcagcagctgaatcgccggcggcagtacgggagacatctgcattcgcttcagatgttttcgctgcggctgccgatgcggctgccgccgttctggctgtgtcagccgacgccgcgctggctgatgcctccccggcttttgtggtcgccgtacctgcgctgctctccgcagatgctgcggatgaggctgcctgtgtggctgatgcttctgccgctccggctgcattcactgctgccgtggcgctttccgctgcctgacctgctgatgtctgcgcctgttcagatgcctgccctgcggcggtggcattccgcgatgcctccgatgcctggcgggcaacttcttccaccatcgcctcaaaacgtcgcagcgcctccgggcggacgtcgtcttccgtcatggcccccagaaaatcattcagggtgcccggttttgaatcatcgtagaccgtaataactccggcatgtgacgggggatacccttccaccaggagcgtgactgtgtactgcccctgctccacatccatgctgtagcgcccggcgtcatccggattttccgatgccaccgtattcacgaccaccgtcgtactggtccggcaggccttcagctgaatggtgcagttctgtaccggcgttcccgtaccatctttcagtacgccggaaataagtactggcatattgcctccataaaaaagcccgcccgcaggcaggcttcagattcattcacatctcagcactgattatccgggtcacgtaaatatgccggcagcgaacactggacgctccgcgtgattatttgtccctttgcctcgcggtgctgtttctgcccgcggtcagtaccggtataaatccgggtctggttttcaatattgctgttaccgcttcctcttccgttatcggcaacggcagcggtggaaaataaaacggacagggaaacccctgccgccagcgaaattacgcgcgacatagtcatatctgttccttgttaaacgaaagagaccggaaatccggtcagtttgtgaagttgttccccgaccgggaaaccatcaccagcggccagacggaagcagacgtggtgtactgcccacgaaccctcagagaaacgctgatatccacgacaggtgaagtggtgtagaccgaaaagacaacggtctgatacatggccggaagccctgcggtatacgggataacctccgccgttttcacctggccgttaatatttatcgtgacggtgatggcaccggagccaccgttacgctcacagttagccatcaccgtgatggttttccctatctgataggtggcgctgtcggtataccgtgttgaggtgctgcgttcgtcgttcgtctccctgatgctcacgccctgcatgacttttgagccgcagatatcaccgacaaactctcttgcttctatcacgccagaaaacttaccggaggtggcattgatttctcccgtaaacgagccagatacagcgttgatatgcccgctgatatccgcatttttcgcagtcagctttccatccggcgtcagggaaaatgccggaggattcccgccactggtaatggtcggcgcgctcagatatttcaggaacgcctcattcatgattatctggtcgccctgcatgacgaatccgggcgtctcgtttccgtttgccgggttaatataagcaatgcgatccgccgccaccaggaactggcttatcttcccgtcaggcatgtcttccatgctcagtccaagtccggccacataatatttgccgtctttggtctgctctattttgacgccccacatggcgttccatttatcgttagcatcctgccactccttcgaaaactgctgcagtttgctggcgttatcctccgtcagttccaccttctccagcagttccttacccaggtgactttcagttatctgccctttgaaaaaatccagatagcctgcggcatcgttgctggcctgcccggtcgcctccacgaatgcggatttaccgacctgatttaccgcccggatataaaaatagtaatccctgccgggcctgatattcacactggccgctatccagtacagcgccgttcccagatatcgtgcggcgttttccacctgatggatatccgtaatctgcgcgtctgaaaaccagaactcatactgcaccgtcgggtcgtataccgcctgacgcggtgtggctgtaatctggaaatagccaggggtgagttcgataaatgatggtgccgccggcgcggagatgctgaactgtgtgctggccgggtctccctgttgtccctggctgttcaccgccctgacggacagggtgtagcgccccggcgtcagcccccggaaccggtactgcgtatccggcgttcctgcgctgcttaccagccggtcactgccatcttccgccgccacgttcaggcgcaaagaaaacgaggcgcccttaacgactcgcggtgtgtcccagcgcgccagtacctgatactgtccctcctccgccagaatttctgtggtcagatgctgtatcgccgggggaacggtgccgtgaatcgttccgggttgcggatcgaatgatgccccgttgtccacgatggactctttttccggcacatgctgtacggcggtgatggcatacgttccgtcgtcgttttcccggacagccacacaccggaagagacgctggcgcagcgacggcagtttcagcccccagacgctgtattccgccacgccgtccggtatccggctgacctgaacctgcacaccgtcggtaacagactgcacgtccacgctgaccggcaagccttcgccatccatcaggcttatcagcgtggtgccggacgacggcagggtaatctccctgtcaagggtcagaatgcggcgggcgcggtcaacggacagaatccgcccgcccaggctgatgccggcataatcctcgtcgcaaacctcaatcacatcaccgggaacgtggcgcagcccctccgcacccacactaaaatcaaccgtctgggtttccagcagctccgtttttatcagccacagcccggcgcggtgcgcctgcccgcgactggtacagccaaacgcatccatttttaccagattgcgtccgtagtgactgatggcgaccgtgtcttccaccagttccgtggatgtctgccagccattatcagggtcgatccagttcacctctaccgcattatggcggtccttccgcgcactgaagctgtaacggaacggtgtgccctcatccggcattaccacattgctgcgggtataggtccagactgtatccgagggcctgtcctgcacgaaggtcatcatctgcccgttccacaccggcatacaacgcatggcggagcagaagtcggtcagcacatcccacgccttacgctgctgtgccagatacgcattaaaggtcatacgcggctctgtcccgccgaatccgtcagggaccatctggtcgcagtactggcctattgcatacagcgcccacctgtccacgtccgccgcgccgattcgctgtcccatgccataacggggatgtgtcagcacatcccagagacaccacgccggattattgctgtatgcaggcttgaacgtgccgtcccagatgccgctgtaggttcgcgctaccggatcgtaattcgacggcacatgaataatccgcccgaaaaaatggtaatttcgcgtcacctgctggctgccgaactgctcagactccacctgcaggccaattacggcggtgttgggatagcgctgccggacatcaataatctcggtatacgacgaccagaccgtgttgttctgtaactggtcagtggtactgtctgccgtcacacgtaccatccggataccaaatggccggggagggagattatccactatcaccgaggccagatactgtgtggttgttttcccggtaatcgtaatctctttttccaccacccactgaccatagcgctcaagatggatttgcagcctgaccgatgtcggattgcggtcgcccttgctgttggcctccaccagtgactgcacgccgaacgtaaaacgcaggcggtcaatatttgcagccgtgatggttctggtcaccggattgtcgtatttgacctgtacaccaagcaccgtctcggcgccggacgattcaaatccctccagcggggtctgttcctgctcaccgacgcggtataccaccttcacgccgtggatattcgtgttaccgtcgcggtccaccaccggcgtctggtttaccagaacactttgcagaccgttcaccgggccttctatcggtccctcgctgatggcatcgatgacgctcagcagctgcgtggatttaaggttatccggtgcctcgcggggcgtatgcccttttccgccgccctttcccatttattaccccgtaaaacgacaaaaccgcccggaggcggttctgtctgaatctgttctgttgtcagcggccaatcaccacaacctgaccaccatctccttcatcagcggtactgacttcctgggaaatcacgcgtgaccccacctgcatctcgccgtacagcaccggcaacgtgttaccgttggcaaccatattatccagcgacgagaaatacgtgttctgcctgccgttatcggtctgcctcatttcggacattttaggttttggtgccagcatctgcgccacaccgcccagaaccatcgacgccccggtcatatacataccggataccgccgccgctcccagccagcctgccgggttccaccaggcaacggcaatcagcgccgcaccaagcaccgcctgaaacaccccgccagatttggccccgcccagacgcggcacaatatgaatcaccgcgccaggcggcagcgggtcatgcaggctggttgtcagggtatcagccgtaacatcgtctccggctatgcgtacctgataccagccgtcgttcagtttctgccggagaccgggcaactgtaccgccagtgcccggacagcttcagcaccactggctacctgcaggctgacgcggcggcaaaatcgttgcagatccccgtaaaggcagatgcgcgccatgcccggtgtcgccagatggagtgcgtgcgtcgttgccatttgtcggtatacctctcacgtttactcagttgttcaggaatatggtgcagcagctctccgtcgccgcagtaaatcgctgcgtggttcggaacggaggagccaaagcagcaaatcaacacgtcgccgggctgcgcactggctgcgctgacacggtaaaaccccgtcgtctccagattatccagatagagattgtcaccatgccgccaccagtcgtcgtcccggtgaaaatccggcatatcaatccccgccagatgataggcatcacggaacagcgtgtaacagtcaaaaaccccatgtttataatgccgtccggtcaggtgtggcacacagcggaatttatgtacctggccggcgcataccagccaccacggcaggtcgctttgaacctgcagcctgcggtccacatcgctcagatacggctggccgccaggatggctgtgaaccagcgccacaatatccccctgcgtttcagccctcagccagtcctccggcgccatacggaaataatcctccggcgcggcagaaatattcacacaggggagataccgttctcccgcctgtgttctcaccacgaagccgcacgactccgcaggcgcacaccgtcgggcgtgcgccagaatatcctgttctttcatgatgatttactgtgaaagtttattaatggagaggaaaccgccaaagtttccggtattgttacgcagggcgcatccccgggcgcagcggctgcaggcatcttttgccggatcggcggtagggttatcaaattcatctgcgacagctggtcccgtataaccgcattcgtcagagcggtatatccatgtacaggtattggccagcataattcgcccggggaagacacatccgtccgtttcagtcggtgttgccaggacaaatgtcgcacttaccgccgtcagatcactgcactgctcgatcacccatcggcttacggattcctgctccgggtcagcctcctggttgccgttttgaaaattcacggcatcgagaaaccgggcatatactatcctgcggatgaccgtcgccccaaccaggctatgcaaatcctccaccattccggtcaccataccgtaaagattggataccttcagtgacgggcgcgcagctgcgcctttgccgttcatttcaaatccgcaaccgtctacaggataaacgtcatatttccgtccctgccaggtaaccgcctcccccttttcatttgcctcgttacaaaaaaaataacgatcaccgccagactgtgtcagatcgatttcccacaaagtgatcctggcggactgcgccagtttagcggattcgttcagcgtatcctgcgaaatgtcctgcatcactcctcctcagataacaacctgttcaaaagtcgtggtcacagtcacccaaagagagccaacgttaatcgaccatttgcggcaaatcacccgaatttgtgtccaggtataaggcggcgtccagagaaaggatttcactccaccgtggcgggataaaaatgcctcaaggttctgatgttctcccttacgaatccggaccgttacgttatacttcgccagatggttgttcagcccggctggacgccgttgttcatacccgtcacccagttttatggaggtgacttttggttctgattccactgtcatatcagggcggatcttccagttaaatgtttccattgttatcgccctcctccagcaatacccccgtcacgcgactgctgttgccagaaatcaatggcggctttttttccaatgttatatacggcctgtaatgcctgcggaccaatctgtccgttgccggcgtcgttgtggatttcaatgttgtactcaggcgcaaacatcgccatccctcctgaaccggctgccacgacacccagcttaccgtcagcaccacgacgaagtggtaatattgcctccggtcctgcctcgcccatcaccccggcacctttggcaaaagcaaaaaatgtcgggcgattaacaatgctgccgctgtactggctgagtcctgccgaacggtacacgccgccgtccgcattcggaataaccgacagcgccgcagaactgtatgcccctgatggtgtactgccgcctgccgatgtgccaaagccgaacattgccagcactgaacccaacagtttagaagccgcaatacgtgcctccatttttgcaaggtcagccaggatggagaccgtcaggctccggaaactgccctttccggtcacggcaaaattcgcgatactgtccgccatgccgttaaatgcgtttgtgaaaacgttctccgtcatgcctgccacattgccgccctgcgccagaaagttatccagcgcccgcgacgcccccagcgtccagtctccctgcgcagcgtcaactttcgcattgtaatccgcccactcagccagccggcgatcgagactgcccttcagcgcctgctccgcctgacgatattcgtcagaaccgtatgtcccttttgccttgctgtcgcgtttaagctgctccagttgttcctggtagtgctgctgaattttcagacgctcttcgtatcggccacgttgctgatcgcccatacccattgtggccagcgccattgcgtgctgttgcctgacgcgggattcttcgtcagcgagctggctggtcaatgtgagcgtctttttcttcagttcattaagggcattctggtgttgcaaatcctgttgtgagatatccagcttctgtagcgcaagcgcaatttcatccttatgtgccagtacgctttgttcatccgccgtcagttttttaccggacaaatcagcgatgcgctgctgaaatgacaaaagctgcttatgcgcttccgtcattttttcggtcgtggaaagcttcgcggcggtaatctgcccttcagtctgcgcctgttgctggctgtactgcaaaagcagtcgcctggcctcgtcgttgtggtaagtctttggctttttcgcctgttgtgacaacgcctttttatgacgttcattttcgcgctccagtgcggcattgcgtacagcagcatcggcatactgcatggcggtaatgcgcgccacctcccgttggtgccgcagggattcagtttcattatcccggttcagcgcggcgttctgctcgttccgacgtttctgcgtttcctgataattacgctctgcctgcgccttcgcatccagcaggtccttctggcgtttctgttcctgaagttcgttcagctgctgctgatcgtattcagtctgggaagaagacaccgtccagggcgtttttctgtcgcgcgcgattttttcctgcagtgtcgcgatcttttcatcgagcgtgtcttcccgcccgatatccagcatccgatcccatgcccacttcgccgcatcaccgacagcattccatgctctttcaatccagcccagattgtcgtgtacgtcccccatccgcttattcatttcttccgaatacgcggacatggcaattttcgcggcatcagccactcttccctgctcgcccagtaccctgatttgttcaagctgggtggctgtcagaaaatgcagtgtcctgtccagttctttcgccgcattcaccggatcatcccgcaggcgtttaaactggcggatggtttcatccactgattgtcccacgttttcctgcattctggtcgcggtacgggataccattgccattgcctgcccggtaaacgctccgctaccgaccacctgtgccagcacgcctgcagcatcgtgctgcgtgacgccatttccggcgagcgacttcgccatcgcattaagctggcctgtggtttttccggcataactcccggtcagaataagctgtttattgaacgtctcgctttccttagcgccttcatagtaggccttgcccagcccgtaaacagcagcagccacgccgccagccagcccgccgagcatcatgcccttcggagacatcagttgctcgatccacccggcgcggttagcgagcgtgataccacttccccgcagtgccccgaaattcccacgggccagctcaccagccagcacgcccagttcacgacgggcagcagcgcttttcagtcctagcgtatgggtggcagttccggtacgctccagtttacggatataaatatctgcggcgctactgacacccagttcagccgccttcacccgcagcagctcggtacgggagaggccctgtaccgtcgtctgctctttcaggcggcgtataaactgtgcttttttctgcgtggccagcgcttcggcatcggtaagctcacgggtcttcctggcggtttcagacaccagcgccagataatcgccctgtgagatatctccgcgtcctttcgcctgtcgtacctgcgcctggatacgctgcagctcctgcagaccaccgcttaactgttttacactgtcaatctggcggtaaaaagcagcacttgtcctgtcctgtgctgccgccacagccgctgactgcgcctgttcctcacgcagtttccttcccagtgcctccacccgctgtcgcgtctgatccacatccgccgccagacgcgtactggccgctgcgcttttctccacagcggaactgtacgcggtactgctggcagtcacttgctccagactggcggacgtccggcgcgtcgcctccgtctgcttatccagaaaacgctgcatccgggccgctgaacgttctgagtcaccagccgcatcgttcagcaattttttaatgcgcggaacttcgtttcggaactctgcgctgtcgatacttaaatcaatgaccaggttcgctatctggtccatagcggacacctccggtaataccttcgcccaggatcatcagttcatcatccgttttttcgtgcaacgactcaggatcagtgatcaggctgaacatttctgcatcgtgatgcgtgcctgtaaccagtccggaaatcagcgatttcagcgttgcaaactccgcatccagcaacatgtcactgaagctgttcttcccgaaatgctccgcccactcacccagctctgtcgcactcatttccgccagcatctgccgccagtctggtcgccggaactcacgcgcgagccgcatcacaaacgccagctcccggttcaggacttttccggcgtggtcgtgtccttttcactcccgctgtcgtcttcctgcgatgccggaagacgcataccactcagggacagaaccatatcagcgccacgtcccagcgcctcataagaccattccagtctgacggactcatacagggcgcgggcctcctcctcttttttgctttcacacagggagcgggataccagccatgcattaatatccacccccatctgcataaattctgtctgacgctctgcttccgtcagggtttcaggctgtgcgtcatagtctgccgtccgctgctgaataaacttcagataatccacacgttgcagggcagaaagctcactgagcacgatggaatgcccaccgtagttaaaggtgtctgtattgagaaacatgatgattttccatagaagccccggaaccggggcggactgataagagagggttatgacgccgtcactgtcactgctgccaccgcgacaagactgccgtcactgctgataccaacaatattcacgctgcccgccttcacgcctttaaccgtggccacattatccttcagcgtgacggtggcgatcagcggatcggcggtcgcaacctgcagcgttttatctgacgcgttatcaggttttaccgtaaatgtcagcgtggtggtggctccggcagccaccgtggcactggccggcgcaacggtcacgccggatacgctgactacgtcaggtgtatcctcctccgcaagagaaggacgcccgacgccggtgatttttacgctgcgtgtcatcacctctttggacgtcacggttttacccagtgaactcagccagccgcggaacacatcaaccgtcccgttaggatacctgatacggaaggcgcgaacttcgccggtgtcaaacagctcaaccagttttttctgtccggtctcaccgggtttccaggccagcgtggccgtggtgtcaccgacgcttttctgcccctgcgtagtgcttttccagtcggcattttcatcatcaagatagtcatcgtcttccgcatctgcactcatttctccgggctgcagatccttaatacctgccagtcgcagccagtcatcatcagccagtggatttttaaacgcatcgccgctgccggtatacagccagaatgtggttccggcgcctttcgtttttaccagtgggtttggtgttcccatcatatcctcctcagttggtataggtgatccggtaagtaatttctgccatcccccacgttgccatttcgctgtcacgctggtagtcataacccagcggggtcatggtatcgataaggcgctccagaccactaacctcttccagcgcaggaaagattttttcttccatccagatatcaagctctgtatcaggagcctgagccctcagaaaaactgccgtatggagagtagcctgccagtcatcctcatcggtcataaggcctgtatactgtgcgtctgtcagccagacagctattgcgggtaaatcttcctgttctacgaaagcaggaagtccatcaaaaagagtgacaggtgcgccagtcacggattccagcttttccagaacggcccggcggattaatgtgtgtttgctcatcagaatgcctcctttcctccccggcctgaaggccggggaggaaaggaggcggttttccggctaactgtcttttgcataatcacattttcctctttaatatgtgaagccatgaaacgcgcatataaataccggttttaccccacgactgagcaggctgagcttttagctcagacgttcggttgtgtgcgtttcgtctacaactccatcctccgctggcgtaccgatgcgtactacgagcgaaaggaaaagatcggttacctacaggccaacgctcgccttacggcgctgaaaaaggagccagaatttgcctggcttaacgacgtttcctgcgttcccctccagcagtctttgcgccaccaacaaaccgcctttgctaacttcttcgccggacgggctgcatatccggctttcaaaagcaaacggcacaagcaggcggctgagttcactgcgagcgcgtttaaataccgcgacggcaagctgtacatggcaaagaacaaaatccccttagacgtgcgctggagtcgtccgctgccgtccgtgccgtctaccgtcaccatttccaaagatgccgcagggcggtactttgtttcgtgcctttgcgaatttgaacccgcatcactgccgatcacctcttcaatggtcggcattgatgttggtttaaaagatttgttcgtcaccgataccggattcaggtccggcaatccccgccataccgctaaatacgcggctcgcctggcactactccagcgccggttaagcaaaaaggccaaaggctcaaagaaccgcgccaaagcccacttaaaggtagcccgactccacgcgaaaattgctgattgccgactggatgccctgcacaaggccacccgcaaactgattaacgataaccaagttgtatgcgtcgaatccctgaaagtgaggaacatgatccgcaacccgtcgctatccaaagcaatagcagacgcgagctggggcgaacttgtgcgccagctccggtacaaaggcgaatgggcggggcggtcagtggtagccattgaccagtttttcccgtcctcaaaacgctgtagctgttgcggtttcatcatgaaaaaaatgcctcttgatgttcgtaaatggcagtgccctgagtgcggaactgaccacgaccgggacgttaacgcggcacgtaatatcaaagctgccgggctggcagtgttagcccacggagagcctgtaaatcctgaatcgctcaaagcggcttagattcggctcgttgaagtgggaatccccgtccttcagggcggggagcagtcaacgtgaaagataaagcctcagttgttgtttcagggcataccccagttgcttcggtatttcctcgtcaatcaagctttgtgtggcgctttcgaatgcctgagtcaatggtccggaaagaggaattttcactacatcgattggataacggtttttcccgttaacgcgtcgcataacatgccagcgtccgttagccagttgctgaataaaggcatcccggaacagatatggcccgattttaagcacacttccgcgatacagcagtttgcccctccgtttgctcatcctgacctgtgcagcgcccaactttatggcgggaaggtttccccggttaatccgtatccgggcagagcgtttaccgtctgtaccggctttaaataacctcaccctctggcgaaccagcttcagcggaagtcctcttacctggttatctccggcgacagtctcccgcgccaccttacgggttgccactgaaacagctttctgcgccacgcgattcacagcccagatactggcccggggaaccatctgtcggtcaaggctgttcagattccggatcgcattttcaagccctttcatcagaatgcctccgggaaaccccggcctttaggccggggagcagtcaaacattcctcccgtcctgcgccggttatccgtcggcggcgtccccctgcccagcagaataatactgctgtctccaccagccggagtgatgcgatccacccagaaggtgtcaccgagaatggttagtgtgtccgggcgcttcagatggactgtcagggatgttttgacaaaaaatgtaggcttgtctccctcaatccggacacctccggcggcatacgacacactttcaggatcgtcaaatacgcccgtaagcgtggcccctgccagaacgccggaggttattgttgctaccgttcccatcacccggaggatggcatcatcagcctgagaaatcgcggtatcaaacaggttttcggactgcgacatatcgccacccttacagttcaataataagtcctgcagcaatcagctcgtccacatcgtgttgcgaaatacgcgccgggtttcccgccataaccatatccagttcccggttactgtccggatcgatggcgcagatgtgtagtgtacgaagcgccctgataagtacccgttcggatctttgcccgatcccgggcggcactatggattcatcactgtcattttccacagcaggcaaatgctccgcctccgcttcctcttcccattccatgacacgctggctgagttcagcggcgctcccggacacatccggatcacgaccaagccgcgtcgcaagctcccgcagacgctgtatattctcttcttttgttgccataaaagatcctcccgcaatttgtaacaataaaggcctgaatcaggccttttgggatgcttaaccgacagtgacaatgacaaactcatccgggtccggcaggaccatcagcggcgcagactgcgtcatggtatattcattcgccggatcccccaccgtcagccagtgtttgggataacgggtggcggcaacaataccctccgcgagcgcctgtgaatcctgaatggcaccatagcagcggataccttctgccgccgtatttcccagaaccagagtcccttcaggcaggtaacgcttttcggtcccgttatcagcaacataggatgttttagccaccacaatggccaaatctccgtaataccccttgaacgacaccacagccccaaggtccttcaccgccgtttccagctgagaatttgaaccgcggcgtgtatccagtttttcacggaacagcttaaaaccgttcagcagacgccagactttcccgtccatcacggcaatattgatcagaccggatgcctggtcgcagtacatatccagatcataagtcgggtcaaaggtttccctgtcctgctctgaccattttttacctgtggcctgaataatgttattcccggcggagcgaccaaaatccacctccacggtgtcaaactgctcgccctgcatggtgtatttcccgttcagcaccgcactgacggcctgcatctcctccacctggacgatggccttctcttcctgcttcaggttatcggtcagaatgcgcagacgacggtaggccggatcgttaagcctggccgggtcttcacccggcagacgctcaacaacctgcgcatagttaacttcatgcttcggtttgacataccccggacgcagtacgcgcgtttccccgccgcggttacgcagaaccttccctccaaccaccggagatacataagcggcaatcggtgtttttccggtaattttgtccagcatgacttcctgggtaggaaatgtcacagtacggcgaaaaaacaggctcaggaagagtgggttaaatttaactttctgctcggtataacccagcaactggcgggtggtaaacaatcccataaatggtgtcctccggacgttaaatacgataaaggccgcttcgcggccttcttattacggtaaagcggcgtgactgacggcgcttccggcgaatgcatttgcctgcttaatggcatccacactcttcggccatgccagtgattctgtggcaaaggtgccgctcttccagtacgtcagcaggttttccgacccgtccagctcaagggccagaaccccgaccgccgttccggccttctgcccgtcccaggccaccagtttcccggtggtatcatccagcatcaggggcgtcagcatcggtgtggccgccgttatcccgctgactcccgttgcggtatgtgccggatcgttaccggcgaaaatgcggttatccgcacgtttctcaatagtggtggtaaatgacatactgtctccttatcaggtggctgaagtaccgggaatactcatcaacaacgtcgtttcggtatcattactgtggcctttgccgccggatatggggcccggggaatgagactgcatgaaagcatcaaatgcgttgttcatgctcagccccgcattaccggatttgtccggcgcggcagccagcaggtcacgggcctgatctgtggtcataccaggcatgacagccagtttttccgccaactcttcacggcctttcgcctcatcaagcgccatcacggcatcatgaagtgacgttgccgcagcgatcggcgatgctgccagaatggttctggcctgttccaccgtcatctctggcatggccgccagtgtctgtgcgagtgtttcccgaccaccagcttcttccagggcaaggatacggtcagcggtgctggtcgtgtccgccggcgcggcggcagccagaatagacttcgcctgagcaacgctcattcccggctgcccggccagcatctgtgccagtgcctcatgccccctggcctccgggcaacccagaattcccattacgcgctggttttcctgcgtgacagcgtcagctgcacttaattcaggcatagtgcctcctgtcttgttactgttgatagcttctgccatcacgccgatggcgtcagcagcattcaccattccatctgccagtccggtagtgataatggcctgcccgtcatacactgccgcctccgtcgccattaccgcatcgacagacaaccccgtgtaccgggccactttttctgcaaacatctttctggcctcgtccattcgctgctggtagtcggcatagacactttccggtaatttctggctgggcgtcagatcagccttgtgtgcgccagaatagataagggtgatatcgatcccttcctgtttcagtttttcggcgtagctggtatgcgccatcaccacaccaattgatcccattctggacgtctgggtcacaaggcggtgcgaacaggctgccgccagcaacatggccgccgaacaggctgtttcatttgccagtgcccagacaggtttctgttcgcgcatccggtaaatcatgtcagcacagtcaaacgccccggcagcctgaccgccgggactgtcaatatccagcagaatgccttttacctccggatctgaaaccgcctgttgtagccgggcagtgacaccgtcatatccggtcatccctgaaaagggacgcattccgccgagtttatgaaccagtgttccggtcacgggtaataccgcaataccgttcactacctgataaaaacgtgcctgcggctttccggtcgccataaaatcgcctgtgaccagtgccatatccgactgatccagactttcgttattaccgggaatgtgcaggctgttaatgcctgactccctgcccagcgcgcaaaagaaaacccgcgcataggcgggttcaagcagcaacggagcactggttgcctggctgatgatgtgcgagagattacgttgcacgcttttcctcctccgtctgacggctcgccgcgatctgttgttgataggtatcagtgatccataccggacgcgaaagtccggctgcccgccgttcttcggattccctgacctgctggcggaatatctcctggtaatcctcgcccataatggcgagttctttttcataggtactcagcccggcctcaatacgcatcacggattcctgaacctccttgagtccgtcaatcgccatacgtccggcaccaatccactccgagcggctccagctggatcgggcctcccagaaggaaaacctggcccggggtgcccggataactccccgtatcagcgcctcctccagccagcaggaaaacatttgtgtcgccagccgtccggcaatgaaccggcgccgccccaggaaatagcgccaggactcattggcagatgcgcgggcgctggaatagctgacctgagaataatcacgcgaaagctgctcataagagacccccagcccggcggcaatataccggagcagcgcctgctccagcgctgaaaagccattatcggaatcctgcgcagtctgcagattcagctcatcacccgggtacaggtggggaatttttacaccgcccagtttgatactgttggtactgtaatagcgggcataatttgccagcatgttaacaaggggcgtatctttgttatctgccgccgtgatgtattcaaaggctttctcggaatcgagttcgctttcgatcgtggcggcgtacatggctttgacaatcgcggactgaagctgcgttgcctgcagggtatcaagcatcttcagccgctccatcacactgtaaaactgattggcaccgcgcgtctgtccgtcctcaaccggctcgaaaatatgtaacatcgcgggtcgtccggacggcagaaaacgaggaatacgggtccagcgttccccaccagccaccggccagtcatcatcacagacatgataggcgagggcttttccattccggtccgtttccactcctgcgcgaagctggcggtttccgcgggcataccccggcgtgtccacccgtttcggactgacagccttgaatcgggtacggaaaacctgcgtggtttcagcgtcccagacaggctggagaaaaatttcaccattaaaggcgtgaacgcccacgccttcacggatgaactctgtaaaagtacgcttcccctcggcatccatttcgccaaaaataccatcgcaatattctgtccatgcagcttcaacctcatccacaaaactcttcgctgcgctctcacgcataccaagatagcgccagtttggacgatagctgataagaaacaggtgtccgacaatatgatccttgtgcagcgccaccgcatttgctgcaataccattattacggaccagatcatcagcccgcgcattgccgaggcgcaacgaaggcagcagcgcggcatccacgctttccgccgggggcatccagtcagccatctgtccgccgaaaccgatccccccgccggtgtatcccagactttcccgcagcggcgtgccgtgaacatccaccagaaccggggtgcgcttcacagtctcacccccacaggtgcccggcggcgaccattgcacagtgacgcctcaagttccgcgacatattttttcagatcccctaccgatgtcgcggtaaattcaacccgtcgcccgtctttctgaaccgtcgccacccgttttcccgtcatcaggtcatgcagcgcgacgcgggcttcctgtagctcagtgattgttgccattaactcctcctgccagcattgcggccagttgttcaagtgtcggggtatcctgctcttcgcttttccttgatgtcgccagcgcctccagatccagttgccagcgctgcacagacacccgtaacgctgcactggcatagacaagacaatccagcgcttcgttacgacgtcctttggcatcccataacagccggaattttccgttaaccagtttctccaccagctcttcggctaccagttgcttcgcttccacctccgtaaaaacatccggattatccggaaagcggatcgcataaggcgtggcttcgtcggcaggcgcagtaaccgcccccattctggcgtaaagcatttctttggcagtatcagtaccgatttcgcacaggaataccccgctctggttgcgttttttaggcatggtaataacgggttttccgtaaacggaggcccctttgacaggcagcacgcggaaaatgccgtgtttttttgagcgtttatagacgatttctgcatcgataccgccgatatcccagcagatacgggaaatggaaatatccgtcccgtcagcatgacgatattttttattaatgacggcatccacacgctgcagggtatcttcatcatcatgccgtcccatgataatttgcttatcaataaggaaagcctcttcgcccggcgcccagccccagacatacatttcataacggttacgctgggagtcgataccagcggtcagatacaccacccgctccggaaccggcgccgcataatgaatcactttttccagcaaaagctcatggctgagtttttcggccaccgcctcttcataaggctcgcccaacgtggtgtttataaaggttttcacaccatttggatctttcagcgcatccagccagtcataaataatctgtatccaggtggtaaagggactgtaagccgtccagatatgaaaggtaatggatcgtggcggcggaacctcctcaccggacgcgctgaaataagccagtccatcgcgtgtccacatgcctgtgttatcgcaaatccagcggcctgctttctgatcaagttccgattgacggatcacgcatccattatgttcacaaaggtaatacaccgtctccggcttgcttttctcccatttcagaccgaacggcgtactgccatcaccgaatttaaggtactgttcttcgccacaatgcggacacggtacataaaaacgcataaaatgcgccgattcatttgccgccttttcaatctggcatgaccctttgacttttggtgtggagccccgaatggatttaggccagacagaaccttcaatacgtttatcccccagcagcgtcggcgaaccttctttctcgacatccggctcaaaagatgacaattcgtcatagcagaccacatccaccgatttttcacggtagtttttggctgctgcaccgccgaggcaccagaacccgacaccggaagaaaagcgtttcagggtaagcgtgttatcacgatgtttacgcccgaaccagggggccagctccagcaatacaggaacatccctgatagtcggctccacgtgggatttcataaaatcctcagcggatgagtcggtcggctggaacagcaggctgttgcgcgacttgtgctctatgaaatagccttccacccccagcaacattttggtatagcccacgcgggcagacttaatgaggtttacaacgcggatcagttcataccccatcgcgttcattatcgctacctgaaacggcagcgtttcccatttgccgggggtgtaggaggactcttttggcagatagtaatactcatcagcccactgcacggtggtaagcggtacgggaatatgaagcgctatcagcccgttagttatggctctgttggcattattcgccctgcgctctccggaaatcatcggtccacttctccacatccgctatcgtggcggccctgcctgacgccctggcgatttccgttctgaccacatcgatgtgcgactggcacagatcaggatatttgcgctgtaataccagcggtacccttgacagtatccctgctatttcctgagccacccgttgcaggatgtaggtgaacagttcggtctcaagaaccagcccttcgcgctcagcatttttaagttcctgcgcatccgcctgggcttttgtcaggcggtagcgctcatagtcgatggtgccgggattaagatctgattccgcagcggcacgtaaatcatcaacctctttacgcagcttttcattttcaatagacgcatcacgctccgcgtaccatgaaatcgctgccgcggtgtcgaacactgcttcgttaccttttcctcctccggaaacaagtggcagcccctggctttgccaggctgtgacagttctgacgtcacaaccaaaaatttcagccagtttttttttattcacgttcatggaaaagtctcccggaaacaggaaaggatctgcgatcttcgtttttaactaaaaacgttatccagcagatcctttctttttttctaaaaaaacctttaaaaacaggaaataaacaataagaagaacggatctggcttttctctgaaaattttcataaggagtgaaatcctgcgacgctgccgccccgtaacaggcagaattcccggaaaggaccctggaaaaaaccgaacagttattgttacaatataacaattaatcattttaacgctgactgagggtcttacatatgaaattcaagagtattgctaaaactgtttttctttttgcactgctaacctcagctggctttgcaactggtaaaaacgtgaatgtcgaattcgataaaggacaaaatagcgcccgctattccggcgtaataaagggatacgattacgatacatataacttccaggccagaaaggggcagaaagtacatgtaagtatttcgaatgaaggcgcagatacctacctgttcgggccaggaattagcgattccgttgacctgtccagatattcatctgaactggatggcaatggccagtacacgctaccggcgtccggaaaatacgaactgaaagtacttcagacacgtaatgaagctcgtaaaaacaaagcgaaaaaatacagcgtcaatattcagataaaataaatgccagcctggtcagggggttcgttccaacaccaaacttttcagccactgggttatttcatgaggtgtaccagtttttagcgtctggttacgtttttgaggtgtacgaaaactggcttatatcagtacgataaaaacgcgatgtggtagtacgcagacccagagacattgtcatgtttatgcatttctgaaactcccccgcaggtaagctccttttccctcctgcgggaattttttatttgcactgcgtccggatgtactcctgcaaatacttcagtttttcctgatcgctgatgattccggcgcggatatcgagaacgttttgtccagcaactggagagagttcgacggtggcagcattgcccacgcggcgggtactggcggttttggttgtggttgtggttggcactgtacagcgtccttcgacacgcacccggctaccagcagcaaggcggcgctgcaaatcagtattcctgttttgtgcatcagctagttcctttgtgtattttgcatcgagggcggcaacgtcacgctggcgcttcgtcatatcggtaattgtctcgttcgccagcttcaggttgtgagtagcagtatcacgctggtacttgtaagtgatagcgttattgcggtagtgatttgccagccgaccggcaacaattagcgagacgagcaacaggccaacaaacatcgttttccagttgaacatcatgacaggaacagagcacgctccgcctcacgccgacgggtaagcccgttcagtaccttgctaccagccttattccagcgcaggaactcatcagcggcgccagcgtaatcaccagcgtttagcttccgcagcagagttgatgtggataatgtccgggcgccgaggttgtacgcgaacgacaccagcgcatcaaactggccttgcgtcaacttgaccttaaccagtctggacacatcattttcataaccgactaaaccagttttaagcaagcgctcggcagtagcctcgtcaatcatcattccgggcttaactggcttaccgtcaacagagtgggtccagccataaccaatcgtccagggatctccccccgttcccgggtccggataagctttcaggctacaaccttcaaactctttgattagggtaatgcctttttcactgattctcatcattaacccctgcacgttttttgagtgcgctaattgcgatttcgcgcagcttgtccacaccgacaaagccaataattccgccaacgaaaggcgaaatggaaaccggcaggcctaccacatcaagcgcactggtgacacataaggaaagagcgccacacaggacgccctcaagccatttatttttacgggtggcgccgtcgtatatcagtcggccgtaggcaatgagtccggccattaacgccccaagtatctggggccacgcatttttgagtccggtcaaaaccgcagcccagaattcaggagtcttgtcattcattttcataagcctcacctccgatgatttcggatggtaactagagtgagtgaaatggttgggttgcagggtttaatatcttgtaaaacaggattgcctgtggttgcagaatctgaaagtaaaatcacgcagagtacaattttaatggaggtgaggcacaaatactgcaaatttagcttttagcttaattgattgcgtgctgagtgaattctgtttgacaaaaacatgctatttatagaatgttaattccatgtaataaaaaggatgtgtaactcatcatgccagcaggaattaaaccaatatttatcaataatatgatgtcaatatatggattatcccatcctcatgacagcaaggtatttccagaccttccagaacaccaagataatccttcgcaattacgcctccaacatgatggtcttgctaccgatgataaagccaggctggaaccaatgtgtcttgctgaataccttatctctggaccaggaggaatggaccctgatatcgaaattgatgatgatacctatgatgaatgccgtgaggtactatcacgcatacttgaagatgcatacactcaaagcgggacattccgcagactgatgaattatgcctacgaccaggaattgcatgatgtagaacaacgctggttgctgggagccggagaaaactttggtactaccgtaactgatgaagacctggagagttcagaaggcagaaaagtgattgccctcaacctggatgatacagacgatgattcaataccagagtgttatgaaagtaatgatggcccacaaccatttgatacaacacgctcatttattcatgaagtagtacacgcgttgactcaccttcaggacaaagaagataacaatccaagaggcccggtagtcgagtataccaatatcattttaaaagagatgggtcacacatcaccaccaagaatcgcctacgaatctagtaattgacactcatcaaaaaatgcaaaatcccacgatgctacaacacagtaaccagttcaggtcagcagtccatagacactggctcctgtcaggatgccacctgctaacccagtaccggaaatcggatcggacattcatccccctctggttgtgtgggtcctctcagttatgaggggaaataaaaaaggccgccgaatggcagcctcaaatggaatatgtattaaattggaggttctaacggtcccgccagaatctcagcctctccgttgtgacaaatgtcatcgccctgcgtcagatgccagacaccaataatagtctgaccagtttccaggtcctcggttacgccgtgggtgtagtaagcaacctgaaccctgccgttgtgctgtatccagtagaagccttctttcattctaatctctcctcttcttaagaggagtttagctattgggattgcaggttggcgttagaaatactaaatcatcaatgaagtatttctctggtccgccatcgaggattcgaaccccgaaccacagaggtagaagctccgtgctctttccagttgagctaatggcggaaaaaattgaccagtgaagtccactggtcatgggtcatgcagttgtctctgcgaaacgggtgtatccccacccagtgttttcagtatcgagagcattatcaaatgccatattaactatagcatcgcagaaaaaagtcatactgataattcccaatgacgcacttctgaaaggctctatggttgtattgcgttgtacatagcgcaaaaaataccgattggcagacttagaaatggaaaaccccgcacgatggcgaggcttgaatttgtttggtcgacgattgaagctatggcgacgatatcagatttacataaaatatagccgttttaatccagttttgcaatcaccacgtcgccagcttctcagcaagcaaatcccttttaatgactatccagccgctatcgcgtaatccgctcaatatctgctctacttttccaacgaacatgtctggaccaacctgccgaatgtctttgacgttaccatcgcggatcttaatcagaaggtcgatgttaagcatgtcgacggcaggctgaacctggcgtgttggcgatggtagtgtctgactgaaatagcaatcctccagtttttcgaacacctcccaagcctgatctgtttcgagcatcttggcgtggcgggcagcgccgcgttctgtccagaggattagggaacgggcatttttaccaactaacccgattgtttcgggtctgttcttgaactcgcgtaattcgtttttttcaattttaaaaaaatgctttcctacaacgaatcgcgtggtgttgttcagaaagttatcagaaatgtttttgatttttgtgccgtataagtgcgccaaaagttcggtagtaataacgggaatttggttatgggtaatcggggaaagagtttcgacagagatttgagtggtcataatgacgccctccggtgattgttttgtttatcaccaccgccgacgccaatcggattgggtggtgagacgtacagggttggcgtaaccggatcaccgaccggcgagcctttcggctcccccatacgccccaccataattcaaatgcgcgtatacaaacgacaataaaaaacacgctcgcggcgtgtctctgtcgcggtgaaattccgggacgccaatcccgacgccagattttgctggcgtactgggaatatagccccggataactgtttgtgtcaattaagtgcgtataggttgaaagccacctgttccgaacgcgactccgatacactcaaaagagacgcctgatcaagacgcagaaatatcgcgcgcatggtcagccagtgtctggtgaaggtttctgaccagttcttttcgctaacgcctaccagtcccgctaactctttatattgataaacctcacgcccggctaattcagatttgacatcctgtgccgccagccagattaatgcccggagtcgttcctgtgttttaccggccatcttctttccgtcgagttgcgccgcaaacgcactccagccccactgtgttatttcgacctggtgttcccagcaggtattctcactgtaattccacaacaaccacgccttgtagtgttcatcgagtgaaagaaccgcccggcgccatgaggcagtggaatattccacaggcttcaccagcgggatagcgcttcctttcgccagcgactgcttgccggggattggcgggttatttaacgttatccagctttctgtttcctcgtcccagatacgctgtttttttcggggatagtttttcgtgtcgaattgcgcgttctccagccaggccaaaagctgccctttagtctccccgcttaaatcggctgtcgctaccattagctgctcacgtacatactggaggtattgagtgttcattgagtaaatcctgtgaactgataaatacgaacaaaattgcgcaggatgcggtagtcaaccaacaccgaccccggacggcggtatatgcggaggcgctgccagcgcatgcggaggatctcgatcagttctggtttcatgcggcctccagcttttttagcgcacgcagatccgccagagccgcgagcctgatttccttcagctcctcgaccgtccagcggtgcggggtgttattgttctcgagtgccagcaccgccgcctcaccgtaacgctcaaccagcgcggtacgatatgcttcgatgttccctgatttgtagacgttgcagacatcacactgaagatggatgttgaagcgagtaaagcgcagatgcccggcggcggccgtactcctgtaatggcctgcatgccatgcgaacgccgtcttcgttccacaggagatgcaaccgagtccttctgccagttcggtttcacggcaaatgtcatttacggcgcgctgcgtcaagtcaatccagtgcttcagcggcttaaccgcggctttccgctggcgccaggcggcgcgttcttttttctcagcggcgcgctgaagggattgcgccttacgttgcgcggcttcgcgagcttttctggtttgttctttgccgacggcgctggcacactggtacgagcaaacgatctgcccctcgcgtatcgggtgaaaccactggcggcattctttgtttgcgcacttacggcgcggtaatttagccatgctcacccccagaccttttggcgtaaggattttggcgtccgcacccggtgtgcatattcaggtaatttcgcgctgacagtccaggtaatgaagtcagggttcaggctctttcctgtccttatgccccgcttctgataatccgatatcagcgtgtcggcctgctcggttgtgcagtcatgatgatggaaccaggagtatttcatcgccatcaccccgcccagctcatgagctgggcggcggcgttctcggcctcgcgctgagtacggaatgtacgtgataaaatccagcgccagagaacatcaagcgcggatttatacaactgctgaaattcgacctcatccatgctggaaaaagcgatgctgcggggatgtttgcgaagggtgccgtccggtaactggatggcgtcatagtgaccagcctcaaccgtcacccatgcgcggtaggcatcgaatgatttacacaggctaatcccgtttgttacccggcggtttgcaatctgttccagatactgttcagccgcatccagtaatgcgctttcattcccgccatatgcagcgagaaactttgcataaccgtttaccagtttgcgctcattggcagaaatggcgccgccggtaggttcccagtattcaaacccaagattaagcaacgcgaaaaagcggcgatggaatgcaggattcctcacctgacggaactcagccaccagcacggcgccgagtttgatttttgattgcagaatatcactggtctccggcgttgcggggatcagaattccagatgactgcttgatgagttgtaattcgtgcgccatggtattctccgtggcgcagaaggttaacggttgttcaggccgttgatttcatattatcagaaggtggtgttacccggtagccgagacgacgaataaaatgcataaaaccgttgggagtaaaaacttcttcatcatccagcaaaggacgcatagataccatgccatttacacgatagataagatgcctgcctgatgatggaaagctaaacaccacgcagccatcagatcttcttacaatgtcataccagctatcttctgacttttgcaaagctgaattactcaatttttgttctcccttcaggcgatgtacagacgcggttaaaaattgtcggcagcagcatcaaagggatacgcaaattgcggtattctgaaaaatgcgcgccagcattaagcgcaatgttaataaaaccagtcgtcagcgctttcccacgtttcctgcaggatgctctgtatacgttttttatcgccatcagcagcaccgacgatactcagaccatcctgactgcctcgacggatggttaagttgcagttttcatactgattctggagacgggtaattaattctttttcaagtgcaggaacggcaccttccggaagctgttttgtccggctgataacaagttcaattctcataattccctctacatttaactactgtatataaacacagtatacctgttagaaagaatattcaagaggtgaatagcactttttgcaaaagctagcatgttgtttcatatcagattttaggcggaaaaacccgccgaagcgggttaaattgtctaaagtttttagactgcaatttcattcggctggcaaagctctggcaagtttgcccttactggcgtctcagcatagagaagctacataacctgctaggagggcttaaacgccatttttgtgctccccattttcagttttccttgccgatgaagctcatttagcagccaaaaagcgcccaagttagagatgcaaaacgccatagcaaccaacttacaaattcgcctccgattatcaggaaagtccttaggaatatcattcataaaggcgatagaacttgctcccaaattagtgatggatgttattagggtgctgtcaattagtgaggcatggttaatatcatcaacggggacactcattatcaaggagtcaatacgctccgcatcttcatcggttattatatactcgattttatgggcatacttattacgaatattgttcatttccgtgaggcatttagccaatgaaacaggaagaccaagtgcgacggcggttttaatcttaggcataaagtatttgtcaacatctacaaacttttcggttccttctcgacggagattttcgattactattgaaagaaagttttcatgtataagattgagtttgattaatgcggccgattcatcaacaaattcagtaatgggaacatacttctgaggatcaagaaagtagcccaaattatggtcgatcgacgttcctgttgactgttcaactctagagtatttcattgaatgctcctgtgatttattgcattagccttaaaaagacattactttcatcattataaagaaatgatataaccaaaatcttaatatgctttgatttagatttggttttattttgttatccatttgctaagcatggcagcgcgacaggcgttccaaccctccacaaatccgcactcatgcattcctataattccgtccgccgtgatttcctccggcactaccggcgctgggtgttttttgatgtgcaagcgaggctcaccatctttcggctcaggccactggcgggacttgtttatctccagcttttccaccatcgcccgggtaatctgtttgtcagtaataccagcacggcgctgcgcatcccataacaggaattgcatatcagccaattcgctgaggtcgccaggttctgcggcagtttccaatgcctcttttgagagatgtttcagcggccctactggaccgacatcgccgaacgtcttatctgaccactcggcgtgctcgcggcgaatacgttcgcgttctgacgctggctgggcggagtagaaatacggtctgatagtccactttttattccagaaatctcgcgttttctcagcttcctcaagcgttgcaacactacagccaacctttccgcactctttgatgacgtggtatccggctggctcttggtatttcagccccacattctccgctaccagcgccgcgcatctggcttccagtgccgctatggtagttacgtgttcagcattacgttctgcaagctgattcatggttaaaccatcagttattccacgttctttcatttggttgctcctgttaaatcagaccggcgtctttgcgttgtttgtatttcgccattaacaactcggctggcgttggaccgcgatcccgcgacggcgcggataaagcgcgacaaacaggcggtatgggtttacctgcaagagctcgcttttcccagtcatgcaggatgtcgccagcggcccggataagttccttttcacttaattgcccctcagttccacggcggcgcagctccaggcagacgtggtaatacagcggatttttatctctccaggggaactgctcactggtcggataacggaaaacaagcttccgccaacgccagtattcgcccatgatgtcgtcaacactgaccccgagtgctccactcccctcacggcaccacgaaataaactgacctggcgacggccagaatggagactggctggaacgggctttctgcattccggcggatagctgcttgcgggtgcggatgccattttctgaaaatgccgctatccactgctgcttagctactcgctcgtcagcatcggagcggagattggtttgcgtcgcggccgggaaaatctgcttcagttgcatgaacagcgcgtcaacaaggcgctcagcgtctgaattcacaacccggccatgctcagggttgcccccggctatgcttgccatcgctgcgccatcccgattgtttattgcgcggtagagttcaggtttcataggaaatccctccatgcatccgggctgttccagtggatactttcctgatcggtatctctgctgcgcttcgcctgtccgtcaggttcgaacagaccctgccagccattcgcaatactgcggttaataatttcttcaggtgtgtatccgttcagcctgcagcggtcaagcaggttgatagcctgcgtcacggtctgctgagacttgatcggctttttcaggtcacggcggtattcaacccatgaagaccagatgatcgaagacagccagtcaggcaactgaacacttgatgcatcgaacgaaaccgcccgggggggtttagggggtttattactattgtctttactgtcttttgtaatagtgtcttttgtgtttacctgatttgggtaatagccgttacctgattcgggtaaacttttcttacctgattcgggtaaacttttcttacctgattcgggtaaacttttcttacctgattcgggtaaatttaccttttccaggtaaggttttttttctgtaccttttacaggtaaagatgaccattcgctgaccgttttattaatcccgataacacgaccggtttgagttaatatcccccgcttaaccagggcgctttttgcagatgagcacttatgagggagaatgccggtcagctccgagagctgctcgttactgacccagtcagatttcttattgaagccgtatgttttgcgcatgacagccatgaacaccaaaagctgatgctgcgacaaacctgcatgcattacagcctcaaggatctcattggcgatgcgcgtaaacccatcatcgagatctgccacgcgcggctccttatgtgccacgtcaggcacaggaaaattgattacttcagcagtgtttgccataattactcctgtgaattgatccagttaattccaccagaaagccgttggtgacccctcaccgcggctttcgcctttttggttgctaccattttcagtcccaccccagcgcatccggcctggctcgttcagcctttagcccggcatcagcgagaatctctacggctgtgagatagtttctggataccagtaccgcctccggtggcgcggcctgaattccaagaaaagccagctctttcgccatgttgcagaaatatccctcagctttacgtctgctgactgtcgactcgctgatgcccatatgctcggcgtaagatttctgacctaccgatgcaagccggttgagcaggacgctctctatttcaatcgggttgatttctggtgggtctaactttcgtgcaattgcgttctccatgggtaaatatcctctatggttgtttggctgatgcctcttggcttggtaatccatctgttgggtttgggtagagatcagggcgcagttcgtgtggggtaacaccagtagcgctgtaaattggaagtactcgatcggcaggaaccactccttgataacgattccgccaatgactgatggtcattgcgcttacttccagtagttcagcaagccgggttgcggttcctgctctggtaatggctttatcaattgctttcatatttgactccagtggcaacagccaaattaaacaaaatgtttatcataatgtcaacattttgaatattgagctaataaacttttggtttagaattgtgttatgaaagaaaaaactcatcagattaatcacccacaagtgcagaggctcaacgagatcctcgaacttaaaaagttgaccaagtcggacatggctcgcatttgcggggtcagtgctcagtcggtcaataactggtttgtgcgcggtacaattgggaaaagctcggcgataaaactggcagacgcgcttggggtgagtcttgagtgggttcttggccaagaggtcgacgagagggacggtttaaaggccgacgaacggagactgctcgaactatatcgccagcttccagatgacgaggaaaagcagaattttcttcgggtattatcgcttcgtctcaaggaactggatgccatgtacgagaagtacatgaagggaaggattcgaacgcgcgaagattaagataaaagctcggagtaattatcaaaatgactcattctcaacatagcaaggaataattatgccagcatcggtaattagctttattaatatgaaaggcggggtaggaaaaacaactctatgtgttggcattgctgagttcatggctaactatcttggtaaaagagttttagttattgatgttgatcctcaattcaatgcaactcaatcactcctaggtcattatggtcgtgtcgatgaatatcttgatcaacttcaaacaaataaaatcacaatacgtcgaattttcgaagttccaacatccattatggatacggctcaagccattagacctgttgatgttataactaaagtttctgataacctcgacgtcatcttaggtgatattaatataatctttgacacatctcaggagtctgtaagaatattcaaaatcaagaggttcatcgatgataacaacctccgtgaccaatatgattatattttcctagatagccctcctacaatatcaattttcactgatgcttcacttgttgcttcagatttttatgtcgttccggtaaaaattgatcactactccattttaggagcaactagtctggtcagtgtggtgcgaaatgtaagacacaatcataatccgaatattagacacttaggattcgtttacaccaatactgatgatgaattgacattaaaaacaagcaagataaaagataattttgaagaaaaattcagtgaattttacttctttgaacataagttatcatacgtacgagatttaatggttgggcagcagggtaacattccctcttgctatacaaagtcaagaagtgatataagcgcaatatcaacagaattcgcattaagagttgaccaactaatggtgagtgaaaatggataaagaacaatacaacactctattcaggtttgcccatggcggagtaacaaaagaatccgcgataggtctttttgtgaccatcttacttgataaagatttgttaaaatcaaatcatgatgtaaaagattttgttgaaagtgtcttttccatagccctattaccatacgttgttcgctcaagaacacttatttgcgcaaaaatatgcagatttttagtaagcagagaaagaaaagaaatcaataactatggtgttatggctcgttcatatttcgaaaatattttttctaaagaagaagacctgcaaggccataaaaaaagaaatacagcactttctaatatggatctgtgggtatctaggatgcttaagaaaggcgataaataatgctttctaacgacccatacggcaacagagcagaaactgacaggtttcgccaagaggcaactaagtatctgagtgatgagtcagatataaataccttggtaagtgttttcaaacacgttagaatttatagcatgattattgaaatgaataccaatctatcacacaaatcacatgtgaagggtataatttatgattctttaaattccatcgttgcaatattaaataaaagagaacgatatttacatttaaatcttcgttctatgattgagcatatagcaagaatagctttgaataaaacttattctggtggtgatttcgatggaacggtacgacgacgagattttgattaccttaaatctaatagaagaaatgaaaattggaactatctgcacaatgtttatataaacgcttgtcattatgtgcatttttcaccgcaagcaaatattaacacgtcagcaacttttttgcagttgcttgtaaacgactgccattcatcgcaaaagaatcttattcgtaatctacatagattaacaagttccgtaatggaaacttacattacttattttcactatgaagttgcgagtacattttatagatccatggcagatctgaagtatctgctggggaatagtttatacaccaaatttaaagcgctgaactaacacctctaatttaaccgggcaacaaagacgttttttatccttagcccccttccccaaaactgcaagtgatcccagcctcatggctggttttttttgtccaaaatcggcataaatcacacctccaaaagtcagattaaacattttgtttattgatttatactcattatgttgacatatgtttaaacattgtgtttaatgaaatcaccaaaacgcaccacgaccacccaggcaggacgcccacgaagtagccgtccggggcatacgaagaccggaatgaggtggaaaagttaacgcgcagaaggtgataaacgttccgctggccggcgataaggcaaacgagggtgagaatgattgatttcgcacgtaaaccagctcgacagcaggccgtcccgctcaaccggattgaggttttaatccgccgcctctgctacctgctggcgcagaaaggagatccggatgcttaaacaatgcggttactgccgcaaatccattgatgaaggcaaagaagtaaaaaacacccttctctatctcaacggctcgcaactggcgcgcaaagaaaaggaatattgttccaggcagtgcgctgaatacgaccagatggcgcacgaaagttaaatagtagttccgaaatatgaaatgaaaaattcgccattaatttggcgtggcttcctacaccctgaatttaagactggagaaattatggaaatcgtaaaaatcgaaatgaacctgaaagcagttaataagagcattgctttattcaattgcgaaaagaaagtctcaggcgttattcactcaaattcaactggcgaaaccactgtgattctcgacggtggatatgtactcggaaagttcgactgtcctcattgtgctgtaaaagccatttcgctgctcacagtcaaggtaagtgatggagaacaagcagggtttggtaattaccgaagttacaagcttgattactcagaaaaattttatcagaccatccattaagaaaacgcccaccgaagcgggcgtgccctgtccggtccaaccgaccaaagcgaaccggacctaacaaccagatatatcggggtgctgttaaggcacctccattctacacgaattgaggacaaaacaatgagtggaactaatcctgtatttttagtccgcaaagcaaagaaatcatcaggccagaaagacgctgtactctggtgcagtgatgattttgaagcggcaaatgcaacactggattatcttctgattaaatccggtgcgaagctgaaagattatttcaaagctgtcgctactaatttccctgtcgttaacgagctgccgccggaaggcgaactgagcctcactttctgcgattactatcaactcgctaaagacaatatgacctggacgcaaatccccggcgtcaccctgccatcatctgaagccgccgccgcggcgcgccagcatatcgtcgatggtgttgataccgaaacaggcgaagtgctggaagaccacaccgaaaattttggtaacgaaagcaacagccctgcccaggcaacagccccagcccccgagctgactgttgtcgcaactatgcctctccgtcaccgcgttcttgctcagtacataggtgaaggtgagtatctttatcacgtcgacgcctcccagaaaaaagaaattctgcgtctcgaaatggacaccgataattcatatgtccagaacctgctgcttgccgccgagaatgttgaagcgttcaagaaagccattgaacatgacattcacaaaatagtgaatgccgttaaaaaaatattccctgtcgatggaaaaactcctgaactggcgactgttatccagttccttaaaacatggttcgagacggagcatatcgatcgcggtttgctcgttaaggagtgggcgaaaggcaaccgtgtatcggctattcaacgcactgaaagcggcgccaacgctggcggtggcaataagactgaccgtaaccctgattacgaacatactctcgatactctggacgtagagattgcaatggccactttgcctatggactttaatatctatgagctacctggcagcgtttaccgtcgcgcaaaagaaatcgtaaagaaaaaggaaagtccgttcaaagaatggtccgcagcacttcgcgcaacgcccggtatcctggattattcccgcgccgctattttcgcgctgatccgaagcgcgcaccctgagttttatcactaccccggacgccttcaggggtatatcaacgccaacttaacggagactgatcacgagaaccccaccgaggaagctctcacggctgcccgacacactccggaaaaagacgcggtagaagaagccaaccgacagcttgccgccgcgcgcggtgaatatgtggaaggcatcagcgacccgaacgacccaaaatgggtgaagaccgggacaagccagccgaccaccgaacctgaactggttaaaaatgttggcaacggtattttcgacgtgtccgctttaatgcagaactcatcaactcatggcacagaaacgaatccggagaccaccagcaatgtgcaggttcaaaaagctgacagtgatgaaaaacaggctggtgatgcggtgcaggcaggcgaaggcgatctgggtactggtaaagaagcagttaccgtagagaaccagaatcaggctgagacgcaccagaacaacgattctgtgagccaatctgaacctgaggcgcaacaaaacgtaccggaatcgcaacaagaagagccagaagcagcctggccggaatacttcgagccgggccgctatgaaggtgtaccaaacgaggtttaccacgccgccaacgggatcagctcaactcaggtgaaagatgctcgcgtgtcgctgatgtactttaacgcgcgtcacgtagagaagactatcgtcaaagagcgctctccagtgcttgatatgggcaacctggtacatgttctggctctacagccggaaaacctcgaagcggagttcagcgtagagccggagatccctgagggtgctttcaccaccaccgccaccctgcgcgagttcatcgacgcgcacaacgccagcctgccagcgctgctgagtgctgacgatatcaaagcgctgctggaagagtacaacgccaccctgccgtcgcagatgccgcttggagcttcggtagatgaaacctatgcatcgtatgagcagcttcccgaagaattccagcgcattgaaaacggcaccaaacatacagccacggcgatgaaagcctgcatcaaagagtacaacgccaccctgcccgcgccggttaaaaccagcggcagccgtgacgcgctgctggagcaactggcaataatcaaccctgacctggtcgctcaggaagcgcaaaaatcgtcgccgttgaaagtctctggcacgaaggccgatctgattcaggccgtgaaatcagtcaacccggcagtggtattcgccgacgaattgctggatgcgtggcgggagaacaccgaagggaaagtgctggtcacccgccaacagctcagcaccgcgctgaacattcagaaagccctgctggagcacccgaccgccggcaaattgctgactcacccaagccgcgctgtcgaggttagctattttgggattgatgaggaaaccgggttggaagttcgggtacgccctgaccttgagctcgatatgggcggcctgcgcattggcgccgacctgaaaactatcagcatgtggaacatcaagcaggaaggcctgcgtgcgaagttgcaccgggaaatcatcgatcgggactatcacctgagcgcggccatgtactgcgaaactgcggcgctggaccagtttttctggattttcgtcaacaaagacgagaactaccactgggtcgccatcattgaggcgtctaccgagttgctggaacttggcatgctggaataccgcaaaacaatgcgagagatagcaaacggcttcgacactggtgaatggtcagcgcctatcacagaagactacaccgacgaactgaacgattttgatgtgcgccgccttgaagcgttgcgcgtacaggcataaggggaaaatcatggaaaacacaaatattgttaccactgagcagcaggcaccaaacaccatttctgccagtaacgcaatttttaacgttcaggcactgggtcagttaacagctttcgctaacctgatggcagactcacaggtgacggtaccggcacaccttgcagggaaaccagccgactgtatggctatcgtcatgcaggctatgcaatggggcatgaacccttacgctgtggctcagaaaacacacctggttaacggtgttcttggttacgaggcacaactggtcaacgcagtaatcgcaagctccagtgccattcatggccgttttcattaccgctatgggggtgactgggagcgctgcaccaggacacaggaaatcacacgcgataaaaacggtaaaaatgggaagtacaccgtcactgagcgcgttcgtggctggacggatgaggacgagatcggcctgttcgttcaggttggtgccattctgcgaggtgaatctgaaatcacctggggagaacctctttacctctccggcgttgttacccgcaattctccgctatgggtttcaaaccctaaacagcaaattgcctatctgggcgttaaatattgggctcgcctgtactgcccggaagtgatcctcggcgtgtacagccctgatgaggttgagcaacgagaagaacgcgagattaaccctgctccagtccagcgcatgagcgtacaggaaatcaccagcgaggttagcaccaggaccagcgcgcaggagtcggcagctaacgttgatgctgttgccgacgatcttcgcgaacgcattgatacagcaagttccgttgatcaggcaaaagcaatccgtgcggatatcgaatcacagaaagcgttgctgggtactgcgctgttcaccgaattaaaaaacaaagcagtgaagcgctattaccaggtcaatgcacagaacaaagtcgaggcagtgatcaactcaattccaaaccctggcgaaccggaagccgcagagatgtttgctaaagctgaaagcacgcttggcgctgctaaacgtcatcttggcgacgaactgcacgataagtaccgcgtccccctggacgatatgaaaccggaatacatcggctaattgcatcgggagggggtacgccctcccacctgaggaggttttatgcgcctaataaatcgcagtaagcaatcgccattgggccgtcgcgcatgtgatgttgcactggcggcgcatcatgaaaagttcggcgattacggcagacaaaagcacgttaccaattacaccgttgtagtggatggcgtaaaggtgcctgttgaagtagttaaccgggccaccagctacgtagccaccgcaatgatcggcgtccggaaacttagaaatctgccagcacaggcaaactgaatattagcgatggcccgctgcggggccactggagaaaacgatgagcaaaaaaattagagactttgaattgatgagcacccgcgaaatttgctgccagctcaggatttcttccaggacgctggagcgttaccgtaagcgaccaagcgacaacaacccattcccggagcctgactgttcatatatgggtggctccaacaaatggcttaaaaccaaagtcaatgagtggcaggtcagggaaatgtcacgaccaacacgccgtccaatgtcgcatctgaatctgccccgtgacaacaaaggtcgactcatccggtctgacgtggcgtgaactccagaacatcgggctcgatgatgctcatcagtcgggcccaccatttactataagcttctctcatttcttcgatataggtgtatttgtcgtacaccgaccacactccaggcagtttgtgcccgagcatcatctcagcaatatgtggttcagtcagctcggagaaattcgttcgcgcagttctgcgtagatcatggatcgtaaagtgcggaacctgctcgttataagccttcagcatgaacttaacaaggttgctgctgatgctcatatgaaagccttcgctcatcggcttgtctgcatattttgagaaaacaaaacggcctggcgccagctcaatggctcgttgtatcagcgggagcatttcagggatgatcgggcggattatcggcttcttacttttccgtcccgttttatgattttcccacggtacggtccagacgccctcctcaaaatcgaaatgcgaaacttcagcctgacggagttcaccgaccctgcacgcccatatcagggacaatttataaaggatcttgtttcgctcaataaggcgggaatcctcaatagctcgccagacaatcgcaatttctttgcgatccagtgttctctcccccattttcttctgaataccaaaatcacgaccggacatttcagaaagtgggttaacctcaagcaactggcgcttcactgcccatgagtagcactgccgaccgttactaattactcgccgggtgatctcagtgtatccctgcgccagtcggtccagaactgtaagccagttgtgcagcgtcaactgatgcgccggatacttacccagcttagggaatacatgcagctcaaacgaacgcagtatttgatcggatgtttctttctgaacgcataccatcgcatgccattctctgaaaagttcctcgaatgtgtactggctgttgattttagctttatcgaggctttgcctgatccgcggattttctccccgggcaagaatggcggcccacttagttacctcttcgcgcgcggccttcaacccgaattccgggtaactgccgatcgtcatcttgtcctgcttacccaggaaacggaatcggtagaaaaaagtgacggcgccctttttggaaatgcgcacccacagaccgtcccggtctgccttctcctcaactttatcgcgttcgcgcccgaggcacgactttagataactatctgaaatagccatgatttatccctgcatgtgtccatcagaacggaagattctgtgtccatcataggatatggacgcactggtggacacaaaaaccatgactcatgatgtcgtaggttgactgtacatgcaaccagtatcatttttgtgagcgcttattttgcggggatcttgagaggattttgtcgtaggtttgcggagggtggcggggtatcaattatcgatgtgagcaatgatcgaaaagttacgtatgttcttcatagagataaattattatgccttacgcctggttgaccagactttagaggtcgctgttctgagcttaacgtctgttttaactgaaacgccgcattctacactacaacgctaaggcgaggaaatgttcatagtgtaaggagagcgggaactggaaaacgcctcgcttttttcctgtaaaacaccgcaacgcaggaaaagcgcatgcttatcgggacaacaacccaacgcggcaggtgtaccgttgggcaaaacgtttactggcgcgtttcgattgaggtagtttcgacgcgaacaaggtcaggcgggagggcaacgtttaaaatcaccggctgccaggcgtcgcgctccgccagttttcgggaataaccgcgggcaaccagaaaaccgcccacgccgcccagcacggccccgcttaatgcggcaaggtcagatccaaacagcatctgaaaaagcgccgcacaaagaaatagccccgctaaaggcgacatatagaccagcaacgccgaacctaaaaggcttttttcggcgatgcccaactcgactttctgccccggcgccagcggctccgcgcttggcacaacaatggtatgcgtggtttgcggccctaatttattcagcacgcgactgccgcatcccgcacgggaggcgcagctgctgcatgacgctttaacgtcgcagctcaccaccgcctgaccattctgccaggagacaacggttgcccactctttaatcattgtactgccctgaatttgatactgtcggcaatgcgcttcgccgtttgcggcggaagctcgccgacaatggtgatttccgcgttgtcgcgaacgctgctataaaccgttcggcgcccggtgcgcagcatctgatcgctgctgttttgcgtcgcccggttcacattgacggaaaagctaaacagaccgtcagaataaagccgcgattcgataggcaggttatccatcgtcggcaacggacgacggctgctggaaacttcgctaaagccttgcggcacccaggatggactccagttaaatttcgttttttcgccaccgggaacagaaagcagcggcggcagattcgccttcgccagcgcctgcatgttgctgccgatatcctggctcaccgtgaacgcaataacgcggaactgctccagcgtctcgccatcgcgatccagcagatcaacgcgcatcggcagtttggtgtccatgtccatccagacgatatagctgtaacgcgtaccatcgcgcgccacaacgcggataacttcgcacaatctgtctgcgatacgggtgcgtccgacagaaataaagtcgtagtaaggcgccaggcgcttaaagtcggtgtaaatcagggaaggcagagaatcgacaatataatcaccgttcagggtgaacggctcaaggcccggttcaaaataactgatttcattaccacgctgtacgacctcccggcggggaccgtccaactgtagcaattgcgcaagcgggcgaccatccaggcgtgcgtgtcgataacgcagagattcaacgccttgtttcgtgatgctgacgaatgacagctcgtaattcagtgactgactggcgatgttcatctgctgcaataacgccccggacgcagggtcggccgaggcgtttgctgagaagaacaggctagccgccacaagggacatggcaaaccaaagttgcttcattactgcgattgcgttcctaaagtttggattcctggcacctgtaccgcggcttgctgggtttgcgcctgctcaaactgaagctgttcggagtgcagtcggcgctgcagttcatagtcctgcaacatggcattaatgcgacgacgctgctcctgtacctgctgttgctgactgccgacaggcgctgcttcagaaggcactcccagacttaccgggctggctttccccatcataggcagggtattgaaaaccggcgtttcaggttgttgggatgtttcagattgcccattatagtgctggacaccgacgataactgcaagtgaaacgcacgccgccacgcccatttgggtaagctgcgccgcccacggacgcacttttttccagaacggcattttctgccattgctgcggagcgggttgggcctcagggattaatggcgacacctgacgtactggctcgttttcaatagcggccatcacgcgagcggatatatcgaaatggagaacgtcaggcgtatccccccgcattgaatcgcggatcaggtgataactctcccaggttttctgcatttccgggtcgtgcgtaagcgctttgagcagctcactatccaacgtttcgccatccatcaaagcggaaagtttttctttctgcatgcctaataccttttccagtatcccgctatcgtcaacgcctgataagcggttgaactttattatcaatagcttcccgcgcccggaagatacgtgaacgcaccgtccccaccggacaatccatgatagccgctatctcttcatagctcaggccatccagctcccgtaaggtgattgccatacgtaaatcttccgggagggactcaatagttcggaaaactatctgtctcagttcttctgacaacattaagttctcagggttcgaaatttctttcagcgcgccgccgctttcaaagttttctgcttcaatcgcgtctacatcactggaaggcggacgacgcccctgcgcaaccaggtagttcttcgcggtattgaccgcaatacgatacaaccaggtataaaaagcactatccccccggaaagaatccagcgcgcgataggccttaataaatgattcctgtacgacatcgggaacgtcgcccgatggcacatagcgggaaaccagactcgccactttatgctggtagcgcactaccagtaagttaaaggctttctgatctcccttctggacccgttcaaccaggacctggtccgttaactgctcgctcatccgaggtaatgtctccccaaaccaaatttccacgcgctttcgaaacgccactccataagccgcactatgagcaagcaacaggttagagtgtctatgtttcgtaaagttccgttacgcatttgtttttgtttgtcatgttgtagacaggtcttatcttccattataagtctacagatgctgaacaacgcactatctgtacagaaatgcccatttcgtcgtttgcagagtaacctaacagcatctttatttcactacaaaatccgacgctaacaccctgccctataaaatattttttgccgtttatctctcgccgtatttttattttatgtttaataagcacaacaccagcgaaatcataacgtgctttttagcgccatatagtgctaatctgccgcaaccatgtttagtaaattaaacaagaaccatgatgacaactcctgaactgtcctgtgatgtgttaattatcggcagcggcgcggccggactctcgctggcgctgcgtctggctgaaaagcataaggttatcgtcctgagtaaagggccggtgagcgagggctccacgttttatgcgcagggcggtattgccgccgtgtttgatgaaaccgacagtattgcgtcgcatgtcgaagatacgctgattgccggcgccggaatttgcgatcgccacgcggtggagtttgtcgccagcaacgcccgtacctgcgtgcagtggcttatcgatcagggcgtcctgtttgatacgcatgtccagccaaacggcaaggagagctatcatctcacgcgtgaaggcggccatagtcatcgccgtatccttcatgccgccgacgctaccggaaaggaagtcgaaaccacgttggtcagtcgggcgcaaaatcatcctaatattcaggtgctggaacgcagcaacgccgttgatttaattatctccgataaaatgggtctgccggggcctcgccgggtcgtcggcgcctggatctggaatcgcaataaagagtgggttgaaacctgtcatgcgaagtcggtggtgctggcgaccggcggcgcctcaaaggtttatcaatataccactaacccggatatttcctccggtgacggtatcgcgatggcctggcgcgcaggctgtcgggtcgctaatctggaatttaaccagtttcatcccaccgccctttatcacccgcaggcgcgtaattttctccttaccgaagcgctgcgtggcgaaggcgcataccttaaacgtccggacggttcacggtttatgccggacgttgacgaacgcggggaactggcgccgcgcgatattgtcgcccgcgctattgaccatgagatgaaacaactcggcgcagactgtatgtttctcgatatcagccacaagcctgacgattttgtccgccagcacttcccgatgatctatgcgaaactgcttgatttggggatggatttaaccaaagaaccgattcccgttgttcctgccgcacactatacctgcggcggcgtggtcgtcgatgattatggtcgtaccgatgtagacggcttatatgccattggcgaagtcagttacaccggcctgcacggcgctaaccgtatggcgtccaactcgttgctggaatgcttagtgtacggctggtccgcagcaatggatatcgacaggcgaatgccttctgtccacagcgttgacgcccttcccgcctgggatgaaagccgcgtggaaaacgccgatgagcgggtggtgattcagcataactggcatgaactgcgcctgctgatgtgggactatgtgggcattgtgcgcacgacgaaacggctggagcgcgccctacggcgtattaccatgttgcaacaagagattgacgaatattacgccaactttcgcgtctcgaataatttactggagctgcgcaatctggtgcaagtggccgaactgattgtgcgttgtgcgatgatgcgtaaagagagtcgggggctgcactttacgctggattatccgcaacaactggctgaatcaggcccatcgttcctttcgccgttaacgcctcacataaatagataaaatgcctgggtcagcgccgtataactttcagaataatgctggtctgacccgcgaattactaatctgtcgctaaagcactccccggcttgcggggagaatgcgagcaaaacccggtgcggcaagcgcgcttcgttttccgcaacgtcagtacgtagccgcaaatgccatcccatgttgagcgcttgctgcgtaaaagcgttacctatttgttccggcaagactacgcaaaaaaagccatcttcggtaatacaatccgccgcaatagccaataacgtctggtgatccagcgtagcggtgtaacgcgcctgctcccgctgcggcgtggcgcattccacaccgggttcgtaataaggcgggttgctgataataagatcaaagcgtaccgtctggcgaggcgcccaacgctgaatatcgtcagtatgcaccgttattcgatgcggccagggagagtgagcaacgttttcctgcgcttgcatggcagccccggcatccagttccacggcgtcaataggcacattgtcatccgtccgctgcgccagcattaacgccagcagaccgcttccagtaccgatatccagaattcgctttacatccgcgaccggcgcccacgccccgagtaaaataccgtcagttcccactttcatcgcacaccgatcgtgtgcgacaaaaaactgtttaaacgtaaatccgttacgacgaagaacggagccagactgagacatgtaaaaacaaccttgcaaaaaaacggcgacagcgccgggtgaaaacaatacctgagaagggatatccatacaaacagatgaagattgcggccgtaacgtctataatcagcgccccacacagaggtagaacatgactgtaacgactttttccgaacttgaactcgacgaaagcctgctggatgccctccaggataaaggtttcactcgcccgaccgccattcaggctgccgccattccgcctgcgctcgatggccgtgatgtactcggttctgcgccgacaggcaccggtaaaacggcggcatatctgctgccggcgttgcagcacctgctcgactttccgcgtaaaaaatcggggccgccgcgcattctgatcctgacgccaacccgcgaactggcaatgcaggttgccgatcacgctcgtgaactggctaagcatactcatctggatatcgccacgattaccggcggcgtggcctatatgaaccatgctgaagtgtttagcgaaaaccaggatatcgtggtcgccacgacgggccgtctgctgcaatatataaaagaagagaactttgactgccgggcggttgaaacactgatccttgacgaagctgaccggatgctcgacatgggcttcgctcaggacattgaacatatcgctggtgagacccgctggcgtaaacaaacgatgctgttctccgccacgctggaaggcgatgcgattaaagattttgccgagcgcctgctggaagacccggttgaggtttctgccaatccgtcaacccgcgagcgtaagaaaattcaccagtggtactaccgtgccgacaatttcgaacataaagttgcgctgttgaagcacctgctaaaacaagacgatgcaacccgttctatcgtgtttgtacgtaaacgtgaacgcgtccatgaattggctgaaacactgcgtctggcagggatcaacaattgctatcttgaaggtgagatggcgcagatcaaacgtaacgaaggtattaagcgtctcaccgacggtcgcgttaacgtgctggtcgcgaccgacgtcgcggcacgcgggattgatattcctgacgtcagccacgtcattaacttcgacatgccgcgcagtggcgatacctatctgcatcgcattggtcgtacaggccgtgctggccgcaaaggcactgcaatctcgctggtagaagcccacgaccatctgttgctgctgaaaatcggtcgctacatcgaagagccgctaaaagcgcgcgtcattgatgagcttcgcccgaccacgcgtgcgcctagcgaaaagttgaccggcaaaccgtcgaaaaaagtgctggcgaaacgcgccgagaagaaaaaagagaaagaaaaagagaagccgcgcgtgaagaaacgtcaccgcgatacaaaaaatatcggtaagcgccgcaagccaagcggtacgaaaatgcaggagcaatccagcgaagagtgatgataatgccgggttcgttaacccggcatttttttatcttccacggtaaaacacgcctccatacactgcataaatatctgcattgccgggctgaccgctttcccggcatgatgggcgcacagcgccatgatcgatagcgacggcgcgccaaacggcagctctttcaactgaccggtactaagttctcgttcaacggcaaaacgtggtaaaaagctgatgcccaggttagcagccacacactgtttaatgctttcaatactccacagttcaatggtgttttccagcgtaatccgcctctgccgtagcgtactttcaaacagctggcggaagacacattgcggttcattgatgatgaagctacagggaatatgctgatctggctgcgtaaaatcagcatcctgtagcagtggagaggccaccagcgccagcgactgcttccccaattgctgcatcgtgagcgcgtcatcattacctacgcgataaaaaacgcccagatcgacctcgtcattcagcaacgcatcacgtatcacatagcaattcagcgactgtagcgacaatctgacattcggcgctcgcagcttaaaacgttgtaaaacctgcggcattttgtacgccagtaaggtttcacctgtcgccacgcgcagctctccgccgggttccgcatcctgtcttgcggcttcacgaatcgactccatcacacgcgtcagttcatggatatgcggcatcagctttttcccctcattggtcaggcacattcggcgccctattttctcgaacagttgcagggaaaactcacgttcaagctgttgaatatgaaaagttaccgtcgactgagtgcagcacagcttttgcgaagcccgcagaaacgagccctcttccactaccgttttcagcgtaataaaccgacgcagatccataaccaccaacctatcgaaaatctcgaattcagaattaaaaaacattcatttttttaaatatttcatatcgggtactgtctgctaaaacagaggagatgacaagtgacaccgatgcttttaagcgctttctggacttatacattaatcaccgcccttacccccggccctaacaatattctcgcgcttagcgcagcaactgcacatggttttcggcagagtattcgtgtactggcaggtatgagtctgggatttttggtcgtcatgctgctgtgcgccgggatcgcgttttcccttgcggttatcgatccggcaatcattcatttgctcagttgggtgggggctgcgtatatcctgtggctggcgtggaaaattgctaccagtccagcggcggatgagaacgccagaccaaaaccggttggcttttgggtaagctttggtctgcagtttgtgaacgtcaaaattattctgtacggcattaccgctctgtctacatttgttttaccgcaaacgcaggcgctgaattgggtcatcggcgtcagtatattgctggcattgatcggcacgttcggtaatgtgtgttgggcgctggcgggacatctgtttcagcgggcgtttcgccattatggtcgccagttaaatatcattctggcgttactgctggtgtactgcgcggtgcggattttttactgacccaaataaaacaaaagcggaaaaggcccggcctcttccgcttgttattaccggataagccttacaggctttcggtaaaggtacgagcgataacgtcgcgctgctgttccggcgtcagggagttaaaacgcaccgcataaccagaaacacgaatagtcagttgcgggtatttttccggatgcttaaccgcatcttccagagtttcacgacgcagaacgttaacgttcagatgctgaccgccttcaacgcgtacttccggtttaacttccatcggaatttcacggtattcaatctcgcccagtttgctgacagccacaacttcatcttcagcaaagccggattttgcaacgatgcagcgcgcttcgcctttttcgctgtccagcagccagaaggaattcagcaggtcgtcgttagcggctttagtaatctggatacctgtaatcatgtgatgcctccccaggcaaaattatttgatttcggtcggcctaatcccggccaattggtaaaaccattgttgcttgagtgtatatatacccttcgatcacccttcattctttgatttaaatcaataaaaaccacaccacaaaaagggtgatgaagggaatttattgttttacatcaacttacaccattcagacctataaactttttacataaattttcaactatcttttgtaggtaaccgtttttgtagcacgcaggattttgcactgcagaaagaagcagttaagctaagggaactggaaattcgcaggagagcgagatggcgactgagttaacctggcacgatgtgctggctgatgagaaacagcaaccttactttatcaatacgcttcacactgttgctggcgagcgtcagtcgggtatcacggtctacccgccgcaaaaagatgtgtttaacgcctttcgctttacggaactgggcgacgttaaggtggtgatcctgggacaagatccttaccacggccccggccaggcacatggtctggcgttttccgtgcgtcctgggatcgctcccccgccatcattagtgaatatgtacaaagagctggaagcctccattcccggctttgttcgccccgcgcacggttatctggaaagctgggcgcgccagggcgtactgttactgaatacggtgctcacggtacgggcaggccaggcgcactctcatgccagcctggggtgggaaacctttacggataaagtgataagcctgattaaccaacaccgcgaaggggttgtcttcctgctgtggggctcgcacgcccagaagaaaggcgcgattattgatccacagcgccaccatattctgaaagctccgcatccctcgccactctctgcgcaccgcggattttttggctgtaaccattttgcgctaacgaaccaatggctggaacaacacggcgagaaaactatcgactggacgccagtattaccggctgagagtgaataacgttggcgactcgccgttttatcgcccggataacggcgcgaaagcgccttgtctgaccgggcggtagaaagtacatcattggcccggcgcgcgttgcgtcaccgggctgcagcccttacgctttattctgtcgccaccactcggcgagcagtacgcctgtcgcaaccgacacattcaggctttccacgttcccggtgccgttaattttcacgcacagatcgtcgggttcgcgcgccgcttccggcaggtagtcatattcacggcctaagaccagcaccatcttttccggcagggtcgtactaaagagcgcctgaccgcgatcgctggacgtcgtcaccacggtgtaccccgcctgacgaaaatcatccagtacgtcaacaatgctttcaccagtgatcggctggacatgctccgccccgccttccgcggtacgaatcgccgcgccggactccagcaacgccgcatcctgtaccaccacgcctttcacgccgaagtgcgcgcagctacgcatcatgccgcccagattatgcgggttagcgacatcttccaacgccagcacgcagtcttgatccgccgcctgctttacccattgcttaacggtcgtaccgttacgctttttaatcaggaaacacacgccaccgtggtgctcagtcccggaagcttttgccagttcggcttcatccaccacatggtaggctttacgattcgccgccatccagcgcagcgcctctttaaaacgcggcgttacgctttggataaaccatgcgcgcacgatggcgtcaggacggctctggaatagcgcctggcaggcgttttcaccgtagacgcgcgtctcttccgcacgctggcgacgcaaaacttcagggtcaataaaacttttaccgctaataccaccatgatcgactttctcaggcgtttcatcgcctggcgcgcgggacacggtgcgccacggcgaagtttcatgtttacggtcacggctctgattatttcgctcatcacgggcggggcgacgtccaccgtcagtgcgagactttgctgggcggcctccccctttcccggtacgcgggttatgggtgcgtttatcagagtcatcatcactacggacatacatcactttgactttgccgcttttgttttttaattcatcgttcatgcttttctccaccagcgctgcgcgaagcgcgaagattacccgatgtgcatccggttagccatgatttcgtttaaaagcttgcgactattgtactcattgaataaaacacattgttgtttagcacagactcctcgataatatgtaacattatagaaacatcccgcgcgtagcgggacgtcttccgacgtattcagaggttagctatgaacaccgtttgtacccattgtcaggccattaaccgcatccccgacgatcggcttcaggatgcggcaaaatgtggacgctgcggtcatgagttgtttgacggagaagtcattaatgcgaccggcgaaacgctggacaaactgttgaaggacgatcttccagtggtaatcgacttttgggccccctggtgcggcccttgccgtaactttgcgccaatcttcgaggatgtcgcagaagagcgcagcggtaaagtccgtttcgtcaaagtgaataccgaggcggaacgggaactcagcgcccgtttcggtatccgcagcatcccgacgattatgatttttaaacatggacaggtggtcgatatgcttaatggcgcagtgcctaaagcgcctttcgacagctggctgaacgaagcgctgtaaacgccacggggcgcatcttgtgccccgttttcacctctgccacaatagcgtttttctccgcaaacgctttctatgaccaataacgctgtccttcagttacgcgccgaacggcttgcgcgcgctactcgcccttttcttgccagaggcaatcgggttcgccgctgtcaacgctgcctgctgccgctaaaatcttgcctgtgtgatacgttaacgccttctcaggcgaaaagccgtttttgtctggtcatgtttgacactgaaccgatgaaacccagcaataccggccggctgatagccgatattttgccggataccgcggcgtttcagtggtcgcgtaccgagccgccgcaggcgttgctggagctggtacagcatccggattatcaaccgatagtggtctttcctgcgtcctacgccggcgaagcgcgcgaggtcatttccaccccgcccgccgggaaaccgccgctgtttattatgctggacggcacctggcccgaagcacgtaaaatgtttcgtaaatgcccttatctggatcatctgccggtcatttccgtcgatttatcgcgtctttcagcttatcgtctgcgtgaaatccatgccgaagggcaatattgtaccgccgaagtcgccatagcgttgttagatctggcgggagataccgaggcggcaaccagtttaggtgaacatttcacccgtttcaaaacgcgctatctggcaggaaaaacgcaacatccgggaaacgtcacagcataaaatagcgaaagcgtttaaaattatccggtcacttctgtgtaagggaaaccggtatgagccagcaaggactggaagcgctactgcgaccaaaatcgatcgcggtgattggcgcatcaatgaagccccaccgcgcgggttacctgatgatgcgtaacttgttggcgggcggattcaatggccccgtccttcccgtgacgcccgcctggaaagccgttttaggcgtcatggcctggccggatatcgccagtcttcctttcacccccgatctggctattttatgcactaacgccagccgtaacctggcgttactggacgcgcttggcgcgaaagggtgtaaaacgtgcattatcctttctgctcccacgtcgcaacatgaagaacttcttgcctgtgcccggcattataaaatgcgtctgctgggtccaaacagtcttgggctcctcgcgccgtggcaagggctgaatgccagcttttctcccgtcccgattaaacagggcaagctcgcttttatttcccagtctgccgccgtgtccaatactattcttgactgggcgcaacagcgtgaaatgggcttttcctactttatcgcgctgggcgatagcctggatattgatgtcgatgaactactggactatctggcgcgcgacagcaagaccagcgcgattttgctctatctggaacagttaagcgacgcccgccgttttgtttccgccgcccgtagcgcttcacgtaacaaaccgattctggtgattaaaagcggccgaagcccggcagcccagcgtttacttaataccagcgcgggaatggaccctgcgtgggatgcggccatccagcgcgcaggcctgctgcgagtccaggatacgcacgagcttttttccgccgtcgaaacactgagccatatgcgtccgctacgcggcgacagactgatgatcatcagcaatggcgccgcgcctgccgcgctggcgttagatgagttgtggtcgcgtaacggcaagctggcgacgttgagcgaagagacctgcctgcaactacggcaggcgcttcccgcgcacatagatattgccaatccgctggatctgtgtgatgacgccagcagcgaacattacgtcaaaacgctggatatcctgctcgccagtcaggattttgacgcgcttatggttatccactctcccagcgctgccgcgccgggtacagaaagcgcccatgctctgatcgagacgattaagcgccaccccagaggcaagtttgttacgctgctgacaaactggtgcggcgagttctcgtctcaggaggcaagacggctattcagcgaagccggattaccaacctaccgtacgccggaaggcacgattaccgcgtttatgcatatggtggaataccggcgtaaccagaagcaactgcgggaaacgccagcgttgccgagtaacctgacgtccaataccgctgaggcgcataatctgttacagcgggcgattgcggaaggcgccgcctcactggatacccatgaagtacagccgattttacacgcctatgggctgcacacgctcccaacctggattgccagcgacagcgctgaagcggtgcatattgccgaacagataggctatccggtagctctcaagctgcgctcgcccgacattccgcataaatctgaagttcagggggtcatgctttacctgcggaccgcaagcgaggtacaacaggccgcgaacgctatttttgatcgtgtaaagatggcctggccgcaagcgcggattcacggtttgctggtacaaagcatggctaaccgcgccggcgcgcaggagcttcgtgtggtggtcgagcacgatccggtgtttggtcctttgattatgttgggtgaaggcggcgtagagtggcgtccggaagagcaggctgtcgtcgcgctgccgccgctcaacatgaacctggcgcgctatctggtgattcagggcattaaacagcggaaaattcgcgcccgtagcgcgctgcgtccgctggatattgtcggtttaagccaattgctggtccaggtttcaaacctgattgtcgactgcccggaaattcagcgtctggatatccatccgctgctggcttccgccagtgagtttaccgcgctggatgtgacgctggatattgccccgtttgatggcgataacgaaagtcgacttgcggtacgcccctatccccaccagcttgaagagtgggtggagatgaaaaatggcgatcgctgcctgttccgtcctatcctgccggaagatgagccccaactgcgacaattcatcgcacaggtcaccaaagaggatctttactaccgttatttcagcgagatcaacgaattcacccatgaagatttagccaacatgacgcagatcgactacgatcgagaaatggcctttgtggccgtgaggcggatggacaatgctgaagagatcctcggcgtaacgcgcgcgatctccgatcctgacaacgtagatgccgaatttgccgtattggtgcgttcagatctcaaagggttgggtttaggacgccgtttaatggagaaattgattgcctatactcgcgatcacggattgaagcggctgaacggtattacgatgccaaacaatcgcggcatggtcgcgctggccagaaaactgggatttcaggtcgatattcagctcgaagagggcatcgtgggattgacgctgaatctggccaaatgtgatgaatcgtgagtaatgtactggaaatgttgaccactttaacgggtactgatgttattattgctcgcttatgtcgtctgcatagcacagaggacccttcaatgaacagagaagaaatgcactgtgatgttgtcaaaatttaagcgtaataaacatcaacaacaccttgcccaactccctaagatttctcagtcagttgatgatgtagatttcttttatactcctgctacttttcgggagacactgctggagaaaatcgccagcgcgacgcagcgtatttgtatcgttgccctgtatctggaacaggacgatgggggtaaaggtatactcgacgcgctctatgcggctaaacggcagcgtcctgaactggacgtgagggtgctggtcgactggcatcgcgcgcaacgcgggcgcattggcgcagcggcctcgaataccaatgcagactggtattgccgactggcgcaggaaaaccccggcattgatgtcccggtttacggcgtaccgattaatacgcgagaagcgcttggcgtactgcattttaaaggctttatcattgatgatagcgtcctgtacagcggcgccagcctgaacgatgtctatctccatcagcatgacaaatatcgctacgatcgctaccagctgattcgcaatcggcaaatggcagacatcatgtttgactgggtgacgcaaaatctgatgaatggccgtggtgtgaatcgtctggataatacccagcggccgaaaagcccggagattaaaaacgatatccgcttataccgtcaggagctgcgtgatgcgtcatatcattttcagggtgacgctaatgacgagcagctctccgttacgccgctggtcgggcttggaaagtccagtctgttgaacaaaaccattttccatctcatgccctgtgcggagcataagctcaccatttgtaccccttacttcaatctaccagcggtactggtgcggaatattattcagctactgcgcgacggaaagaaagtcgaaatcattgttggcgataaaaccgcgaatgatttttacattccggaagatgaaccgttcaagatcattggcgcgctgccctatctctatgagattaacctgcgccgcttcctgagccgtttacagtattacgtcaataccgatcagcttgtggtgcgtctgtggaaagatgacgacaatacctatcatctgaaagggatgtgggtagatgataaatggatgctactcaccggcaacaacctgaatccccgcgcctggcgtctggatctggaaaacgccattttgatccacgatcctaagcaggagcttgcccctcagcgggaaaaagagctggaacttatccgaacgcacacaaccatcgtaaaacattatcgtgacctgcagagcattgccgactatccgataaaagtgcgtaaattgattcgccgtctgcgccggatccgcatcgacagattaattagccgtatcctgtaatcgaagccccgtcctgtacggggttttctcttaggagtgaactggtgcgcgtgttgattccttttacggtgttgtttctctccgggtgcagccatctggctaacgaccactggagcggtcaggataaagcccagcattttatggcatcagcgatgctatcggcagccggtaatgagtatgcgcgtcaccagggagtaagccctgaccgcagcgcagcgatagggctgatgttttctttgagtctcggagcctcaaaagaactctgggacagccgcccggaaggcagcggctggagctggaaagattttgtctgggatgtcgctggcgcgacaaccggttacgctatctggcaaatggcgcgatactaaaggcgtaagccctttcctttacggtgcaacatcaacgaaaccaggaaagccagaacggccatcgcggtaacataccagaagaacgaactctccataccgacagattttagcgacagcgcgacatattccgcagagccgccaaataacgcgtttgctaccgcgtaagataaaccgacgcccagggcgcgaacctgcgccggaaacatctccgctttcaggatcccgctaatcgaggtatagaaactcacaatcaatagcgcgcatatcactaaagcaaatgcggcataaggcgacgtcacattctgcaacgcggagagaattggaacggtgaaaagcgtcgcgagtgcgccaaaacatagcatagaggtgcgcctgccaatcttatcggataacgcgccgaataacggctgcaccaacatgaaaacacacagcgcagccgtcataatgccgctggcgacattggcatgcatacctgctgtatttaccagatatttctgcatataggtggtgaaggtataaaagcacagcgagcctgccgcggtgaaaccaagcaccatcaaaaaggctttgcgattacgccacaaacctttcaacgaaccggcttcttttaatgcgcgagtctcatgcttcgaggtttcatccagctggcgacgtagccataacgccacaaccgccagcacggcgcccagcgcaaagggaatacgccatccccaggcacgaagctcagcatcgtccagaacctgctgcaaaatcacaacgaccagcaatgccagtagttggccaccgataagcgtaacgtactgaaacgacgcgaaaaatcccttacgaccttcaagcgcaacttcactcatatatgtcgcgctggtcccatactctccccctaccgagagcccctgaaataaccttgcaataagtagcagcgccggtgcccaggtgccgatggtatcgtaaccaggtaagcaggcaatcaccagcgaccccatgcacatcatgcacaccgaaatcaacattgaggctttgcgcccgcgtcgatctgcaatgcgtccaaatagccaaccaccgataggccgcattaaaaaaccggcggcaaagacgcctgccgtttgcaaaagctgagtagtggtattaccagaaggaaagaagatatgtgcaaaatagagcgagcagaaagagtagacgtagaaatcaaaccattccactaagtttccggaagaggcccccacgatagcccatatgcgtcgccgcatctccggagcctcagcgttgtttttatctatacgctgaataatttctgccatactgttctccttgttgccaggcttaatcggccttttattttggagattcagattacgcgagacccaaaagtaaataaagtgttaattatttgtttgctaatttttatccccaccgtgcctgatgctggcgtttccgtttcagatagtcttcgtcctgacggattttatcccaccaacctttgaaaaccgttgccgccgcggccttaataggatcattaccccgtgtattcaggctgccgtcttctgcatactttttaccgcctttatagttagcgtatcgcctggcgcgggtgtatcccatctgaataaatttacgcgccatgtccataccaacgaaatcatcctgctgccggtaagcttcgaacaactggtagatctgttctgcggatttcatcgccgatgcttcatctttatagcgccagaaaggaagaatttcgcttttgtagggttcaaccagtagcaccccctgctcgcctcgtccaacctgatacaattcaggctgctggcggaagtcgatgctggaaaagtcctgctggtagttaaaaggtttgatagccaatgaaaatcctcactgcttatataagcacgtgtaaaggatagttcatcgttaatgattgggtgggttgtgctcttatcagttctacaagagcaccaacttcgtaggcgggataattcctgtaggccggataaggcggagccgccatccggcagaaacagacaaaaacaaaaggccctgtcttccgacagggcccttcgttttatttgatgcctggcagttccctactctcgcatggggagaccccacactaccatcggcgctacggcgtttcacttctgagttcggcatggggtcaggtgggaccaccgcgctacggccgccaggcaaattctgttgccagaaacgaatcttttacaccgatgctgcgttggctgcattcgcaaagtcagtcacatacttctgtatgctccttcctttccttcatttgccgccttgcctcagcgtaaaatctttcgttcccgaaaatccggaatcagtgctgaaaatcttctcttaaccgccaaaacatcttcggcgttgtaaggttaagcctcacggttcattagtaccggttagctcaacgcatcgctgcgcttacacacccggcctatcaacgtcgtcgtcttcaacgttccttcaggagactctaagtctcagggagaactcatctcggggcaagtttcgtgcttagatgctttcagcacttatctcttccgcatttagctaccgggcagtgccattggcatgacaacccgaacaccagtgatgcgtccactccggtcctctcgtactaggagcagcccccctcagttctccagcgcccacggcagatagggaccgaactgtctcacgacgttctaaacccagctcgcgtaccactttaaatggcgaacagccatacccttgggacctacttcagccccaggatgtgatgagccgacatcgaggtgccaaacaccgccgtcgatatgaactcttgggcggtatcagcctgttatccccggagtaccttttatccgttgagcgatggcccttccattcagaaccaccggatcactatgacctgctttcgcacctgctcgcgccgtcacgctcgcagtcaagctggcttatgccattgcactaacctcctgatgtccgaccaggattagccaaccttcgtgctcctccgttactctttaggaggagaccgccccagtcaaactacccaccagacactgtccgcaacccggattacgggtccacgttagaacatcaaacattaaagggtggtatttcaaggtcggctccatgcagactggcgtccacacttcaaagcctcccacctatcctacacatcaaggctcaatgttcagtgtcaagctatagtaaaggttcacggggtctttccgtcttgccgcgggtacactgcatcttcacagcgagttcaatttcactgagtctcgggtggagacagcctggccatcattacgccattcgtgcaggtcggaacttacccgacaaggaatttcgctaccttaggaccgttatagttacggccgccgtttaccggggcttcgatcaggagcttcgcttgcgctgaccccatcaattaaccttccggcaccgggcaggcgtcacaccgtatacgtccactttcgtgtttgcacagtgctgtgtttttaataaacagttgcagccagctggtatcttcgactgacttcagctccgtgagtaaatcacttcacctacgtgtcagcgtgccttctcccgaagttacggcaccattttgcctagttccttcacccgagttctctcaagcgccttggtattctctacctgaccacctgtgtcggtttggggtacgatttgatgttacctgatgcttagaggcttttcctggaagcagggcatttgttgcttcagcaccgtagtgcctcgtcatcacgcctcagtgttaaagtgaaccggatttacctggaacacacacctacacgcttaaaccgggacaaccgtcgcccggccaacatagccttctccgtccccccttcgcagtaacaccaagtacgggaatattaacccgtttcccatcgactacgcctttcggcctcgccttaggggtcgactcaccctgccccgattaacgttggacaggaacccttggtcttccggcgagcgggcttttcacccgctttatcgttacttatgtcagcattcgcacttctgatacctccagcatgcctcacgacacaccttcacaggcttacagaacgctcccctacccaacgaacgtatccctaagccaactcgactttaatgaacgctttgacgtcgcttcgctccgtcaatcgtcaactccgtaaagttgtcttgggtgatacgttcgctgccgcagcttcggtgcatggtttagccccgttacatcttccgcgcaggccgactcgaccagtgagctattacgctttctttaaatgatggctgcttctaagccaacatcctggctgtctgggccttcccacatcgtttcccacttaaccatgactttgggaccttagctggcggtctgggttgtttccctcttcacgacggacgttagcacccgccgtgtgtctcccgtgataacattctccggtattcgcagtttgcatcgggttggtaagccgggatggccccctagccgaaacagtgctctacccccggagatgaattcacgaggcgctacctaaatagctttcggggagaaccagctatctcccggtttgattggcctttcacccccagccacaggtcatccgctaatttttcaacattagtcggttcggtcctccagttagtgttacccaaccttcaacctgcccatggctagatcaccgggtttcgggtctataccctgcaacttaacgcccaattaagactcggtttccctccggctcccctattcggttaaccttgctacagaatataagtcgctgacccattatacaaaaggtacgcagtcaccccaccccaaagcattcaccgcttgttttgtgtgttgggcgtcgcaaacgacgctccgccaccgcgatgctgctttgcagggccttcaacaccagagaatgctttggtggtggggctcccactgcttgtacgtacacggtttcaggttctttttcactcccctcgccggggttcttttcgcctttccctcacggtactggttcactatcggtcagtcaggagtatttagccttggaggatggtccccccatattcagacaggataccacgtgtcccgccctactcatcgagctcacagcacatgcgcttttgtgtacggggctgtcaccctgtatcgcgcgcctttccagacgcttccactaacacacatgctgattcaggctctgggctcctccccgttcgctcgccgctactgggggaatctcggttgatttcttttcctcggggtacttagatgtttcagttcccccggttcgcctcattaacctatggattcagttaatgatagtgtgacgaatcacactgggtttccccattcgggtatcgccggttataacggttcatatcaccttaccggcgcttatcgcagattagcacgcccttcatcgcctctgactgccagggcatccaccgtgtacgcttagtcgcttaacctcacaacccgaagatgtttctttcgattcatcgtcgtgttgcgaaaatttgagagactcacgaacaactttcgttgttctgtgtttcaattttcagcttgatccagatttttaaagagcaaatatctcaaacgtgactcgtaagtcagttttgagatattaaggcaggtgactttcactcacaaaccagcaagtggcgtccctaggggattcgaacccctgttaccgccgtgaaagggcggtgtcctgggcctctagacgaaggggacgtatcagtctgcttcgcaagacgccttgctatttacttttcatcagacaatctgtgtgagcactgcaaagaacagttctttaaggtaaggaggtgatccaaccgcaggttcccctacggttaccttgttacgacttcaccccagtcatgaatcacaaagtggtaagcgccctcccgaaggttaagctacctacttcttttgcaacccactcccatggtgtgacgggcggtgtgtacaaggcccgggaacgtattcaccgtggcattctgatccacgattactagcgattccgacttcatggagtcgagttgcagactccaatccggactacgacgcactttatgaggtccgcttgctctcgcgaggtcgcttctctttgtatgcgccattgtagcacgtgtgtagccctggtcgtaagggccatgatgacttgacgtcatccccaccttcctccagtttatcactggcagtctcctttgagttcccgacctaatcgctggcaacaaaggataagggttgcgctcgttgcgggacttaacccaacatttcacaacacgagctgacgacagccatgcagcacctgtctcacagttcccgaaggcacaaatccatctctggattcttctgtggatgtcaagaccaggtaaggttcttcgcgttgcatcgaattaaaccacatgctccaccgcttgtgcgggcccccgtcaattcatttgagttttaaccttgcggccgtactccccaggcggtctacttaacgcgttagctccggaagccacgcctcaagggcacaacctccaagtagacatcgtttacggcgtggactaccagggtatctaatcctgtttgctccccacgctttcgcacctgagcgtcagtctttgtccagggggccgccttcgccaccggtattcctccagatctctacgcatttcaccgctacacctggaattctacccccctctacaagactcaagcctgccagtttcgaatgcagttcccaggttgagcccggggatttcacatccgacttgacagaccgcctgcgtgcgctttacgcccagtaattccgattaacgcttgcaccctccgtattaccgcggctgctggcacggagttagccggtgcttcttctgcgggtaacgtcaattgctgcggttattaaccgcaacaccttcctccccgctgaaagtactttacaacccgaaggccttcttcatacacgcggcatggctgcatcaggcttgcgcccattgtgcaatattccccactgctgcctcccgtaggagtctggaccgtgtctcagttccagtgtggctggtcatcctctcagaccagctagggatcgtcgccttggtgagccgttacctcaccaacaagctaatcccatctgggcacatctgatggcaagaggcccgaaggtccccctctttggtcttgcgacgttatgcggtattagccaccgtttccagtagttatccccctccatcaggcagtttcccagacattactcacccgtccgccactcgtcagcaaagcagcaagctgcttcctgttaccgttcgacttgcatgtgttaggcctgccgccagcgttcaatctgagccatgatcaaactcttcaatttaaaagtttgatgctcaaagaattaaacttcgtaatgaattacgtgttcactcttgagatttggtattcatttttcgtccgaggacgttaagaatccgtatcttcgagtgcccacacagattgtctgataaattgttaaagagcaggtgcgacgcggcttgcagctcaccgtcgcgaggtggcgtatattacgctttcctctttttgagtcaagcctttattttcgctttcctcacagacttcttaacgaagcttttctgacccggcggcctgtatgccgttgttccgtgtcagtggtggcgcattatagggagttattagagcctgacaagacctaaatgcaaaaaaaagctcaaccgttcacttttcaaacaacatttgaaccaaaagcctattttcgcctggtttttaaacaaaaacgagcccgtcagggcccgttttattcaaatttgtgacttactgcactgccacaatacgatcatcattggcttcaaggcgaatcactttgccaggaaccagttcaccagacaggatttgctgcgccagtgggttttcgatctgctgttgaatagcacgttttaacggacgcgccccgtagaccggatcgtaaccgttggcgctcaacagtttcagcgcctcgtcggagatatggatttcataaccacgttcttccagacgtttgtacagacgctgcagctggatctgagcaatagaagcgatgtgttgttcacctaacggatggaataccacaacttcatcaatacggttgataaattccggacggaagttttggctaaccacacccagcaccatctctttcattcgaccgtaatccagttcgccaaagcgctcctgaatgagatcggaaccgaggttagaagtcataatgaccaccgtattacggaagtcgaccgttctcccctgcccgtcagtcagtcgaccgtcgtccagcacctgcaacagaatgttgaatacatccggatgcgctttttccacttcatccaacaagatgacggaataagggcgacggcgcaccgcttccgtcaaataaccgccttcttcatagccgacatatcccggaggcgccccgaccaaacgagacacggagtgtttctccataaactcagacatgtcgatacgcaccatcgcgtcgtcgctgtcgaacataaagttagccagtgctttacacagttcggttttaccgacccccgtcggccccaggaacaggaaggaaccaatcggacggttcggatcggacagcccagcacggctacgacgtatggcgttcgatactgcttcaacggcttcattctgcccgatcacacggctgtgtaactcttgttccatacgcaacagtttttcacgttcgccttccagcattctggaaaccggaataccggtccagcgcgctagcacttcggcaatttccgcatccgttactttgttacgtaacagacgcatggttttaccttccgactgggtcgcggcttccagctgtttttccagctccggaattttgccgtactgcagttcagacattcgcgccaggtcgccaacgcgacgcgcctgctcgatggcaatcttcgcctgctccagctccgctttaatagtttgcgtaccagagagcgacgctttttccgctttccactcttcttccagctcagaatactggcgctctttgtcgtccagttcttcgttgagcatatcgagacgttttttactcgcctcgtcagactctttcatcaacgcctgctgttccagtttgagctgaataatgcggcggtcgagtctgtccagctcctccggcttagagtcaatctgcatacgaatgctggatgcagcttcatcgatgaggtcgatagctttatccggcaactgacggtcggcgatatagcggtgagataatgttgccgccgccacaatcgccgggtcagtgatctgcacatggtggtgcagctcgtaacgttctttcaggccacgcagaatagcgatggtgtcttccactgaaggttctgcgacaaacactttttgaaaacgacgttccagcgccgcgtctttttcaatgtactgacggtattcatccagcgtggtggcgcccacacagtgcagttcaccacgcgccagcgccggtttcagcatattcccggcgtccattgcgccatcagccttacctgcgccaaccatcgtgtgcagctcgtcaataaacaggatgacgttgccttcctgtttcgccagatcgttcagcacgcctttcagacgctcttcaaattcgccgcgatatttcgcccccgccaccagcgcgcccatatccagcgccagtacgcggcgaccttttaagccttcagggacttcaccgttaataatgcgctgcgccagtccttcaacaattgccgttttaccgacccctggctcaccgattaacaccgggttgtttttggtacgacgttgcagtacctgaatggtacggcgaatttcttcatcacgaccaattaccgggtcaagcttgccttgttcagcccgctcggtcagatcgacggtatattttttcaaggcctgacgttggtcttcagccccttgatcgttcacgctttcacctccgcgcatctgttcaattgcctgagtgatattggccgtggtcgcaccggctgatttcagcagatcggttaacgtgccgcgagactcaagcgccgccagaacaaacagctctgacgaaataaaattgtctccccgtttttgcgccagcttgtcgcaaaggttcagtacgcgtaccagttccgaagaaggctgtacgtcgccgccggtgccttccacctgcggtaaacggctcagcgcctgatcgatagcggtgcgcaactggccagcattaatgccggcggaggttaataaaggacgtatcgatcccccttcctggttcagcaaggcgctcattaaatgaagaggttcgatgaattggttgtcgtgccccagcgcgagcgactgggcatcggcaagagcaagctggaatttgttagtaagacgatccagacgcataactcctcccataacaggtcaaaattgctactggagattaaatgaggtcatccctcaattattcaaggtgaatgacctgaattatgtgaaaagaaagttacccgtaccggatcgtcttgattctttaggttatatcagccaaataaaacttgccatacgacctgtcgtcttgtcgcgacgataagagaagaaagtctcactttcgctaaaggtgcagcgatccccgccatagacatgttcaacgccggtattcgccagacgttggcgtgcaagctgataaatatccgccagaaatttttccccgtgcggcaaaaatgcgctatcggcttgcgcatcttttgctaaaaatgcgtcacgcacttccggccccacttcaaacgcggtcgggccgatcgccggacctaaccaggcgatgatattttctggtttgtcagcaaagcaggtgacagtttcctccagtacgccttcacataatccgcgccagcccgcatgagccgccgccacttctgttccctcacggttacagaatagcacaggcaggcagtctgccgtcattaccgcgcagacggttcctggcgtattgctgtaagacgcatccgcacgtttggaggcataaggttctccggtaagcctcaacacatttttaccgtgaacctgttcaagccagacaggtttcgaaggcagattgcccgccgcaaacagacgcttgcggttctcttcaacatgctccgggttatcgccgcaatgcgcgcccagattcagcgagtcgtaaggcggtaaactcaccccgccaatacgggtagaactacaggctgcgacgcctttcggcagcggccactgcgggacaatcagtgcattcataaccagtccacatcatctttatgatcttcaaaatcggcgcgcatcgcatcgataaggtccaccatatcttgtggaatcggcgcgtgccactccatttcgatacccgatacaggatggtagagacgcagcatcgttgcatgaagcgcctggcggtcaaacttacgcagagtggaaataaactcttccgatgcgcctttcggtggacgtggacgaccaccgtagacctgatcgcccactaacgggtgcgtaatatgcgccatatgcacgcggatctggtgcgtacgcccggtctccagacgcagcctaagacgcgtgtgcacacggaaatgttccataatgcggtagtgggtcaccgccggtttgcccatgggatgcactgacatatgggtacgtttggtcgggtgacgactgatgggttcattcaccgttcctcccgccgtcatatgtccgatcgcgaccgcttcatattcgcgggtgatctcgcgcagctgcaaagactccaccaggcgcgtttgcgccggaacggttttggccaccaccatcagccccgtcgtgtccttatccagacgatgtacaatgcccgcgcgcgggacatccgcaatcggcggataataatgtagcaacgcgttcagtaccgtaccgtccgggttacccgcgccaggatgtaccaccagatcgcgtggtttgttgataaccagaatatcgtcatcttcataaacaatatctaacgggatatcctgcgcttcaaaacgaatctcttcgtcgatctccgcatcaatagccacccgctcgccacctaacactttttcttttggcttatcgcaaagttgaccattgaccaacacgcgctgattcaaaatccattcttttatacgcgaacgtgaataatccgggaacatttcggccaaagcctgatctaagcgttgaccgagttggttttcggagaccgttgcggtgagttgtactcgttgtgccatatacagcttcttcgtttaacgttgggttttacggctttgccgtttaatatagtgtgctattgtagctggtcttaaccgggagcaggaacagagaatctcccgtaaaacattttgaggaaagtcaaaacgtcatgacgcgcatgaaatatctggtggcagcagccacgttgagcctgtttctggcgggttgctcgggttcaaaggaagaggtgcccgataatccgccgaatgaaatctacgcgactgctcagcaaaagctgcaggacggtaactggaaacaggcaataacgcaattggaagcgttagataatcgttatccattcggaccgtattctcagcaggtgcagttggatcttatctacgcctattacaaaaacgccgatttgccgctagcgcaggccgccatcgatcgttttatgcgtcttaatccaacgcaccctaatattgactatgtcatgtacatgcgcggcctgacgaacatggcgctggatgatagcgcgctgcaaggtttctttggcgtcgatcgcagcgatcgcgatccgcaacatgcgcgggcggcgttcaatgacttttcgaaactggtacgcagctatcctaatagccagtacaccaccgatgccactaagcgtctggtattcctgaaagaccgtctggcgaaatatgaatattccgtcgcagagtactataccgcgcgcggcgcatgggttgcggtcgtaaaccgggtagaaggtatgctacgcaattatcctgatacgcaggccacgcgcgatgcgttgccgctgatggaaaacgcctatcgtcagatgcagctgaatgcgcaggctgacaaagtcgcgaaaattattgccgctaacagcaaaaacacctgaagcaatacaaacaagcaaaacggcagccttccggctgccgtttttttattcggtatctgatgcaacagaaatgatttcactgcaacgcatccagtcaaatatggcctgctttcagccattcctcaagtaaaagatcgcttcttcctgcgatgcctcacaaaaagttcgccttgacaaaaagtgacaaaataatgtgatttacatcacacattttgacattaagaacggtatgctggaatcaccaagacgggaaagacaagaggtaaaatttatgacaatgaacattaccagtaaacaaatggaaattactccggcaatccgccaacatgtcgcagaccgtctcgccaaactggaaaaatggcaaactcacctgattaatcctcatatcattctgtctaaagagccacagggctttattgctgacgccaccattaatacaccgaacggacatctggtcgccagcgcaaaacacgaagatatgtacaccgctattaatgaattgatcaacaagctggaacggcagctcaataaagtgcagcacaaaggcgaagcccgtcgtgccaccgcatcggtgaaagatgccagcttcgtcgaagcagaagaagagtagtcccttacattgagtgtatcgccaacgcgccttcgggcgcgttttttgttgacaggattaaaacagtacgggtactgtacttacgtacacaaaggaaacagttatgaagctcacccggtttttcttcgcattcttttttatcttcccctgaccgggaggcgtttcgtcatgtgataaagaatgcgaagacgaacaagaaggcctcccccaccgggaggccttttttattgataacaaaaaaggcaacactatgacatcggaaaacccattactggcgctgcgagataaaatcagcgctttagacgaagagttactggccttactggcaaaacgacgcgcgctggcgattgaagtgggacaagcaaaactactgtcgcatcgtccggttcgggatatcgatcgtgaacgcgcgctgctggacaggctcatccatctcggtaaagcccaccatctcgacgcacactacattacccgtctgttccagcttatcattgaagactccgtgcttactcagcaggcgctgctgcaacaacatctgaataatactcaccctcattcggcacgtattgcgtttcttgggccgaaaggctcctattctcatctcgcggcgcgccagtatgctgcacgccattttgagcaatttattgagagcggttgcgcaaaattcaccgatatttttcatcaggtcgaaaccggccaggccgattacgccgtggttccgatagagaacaccagctccggcgctatcaatgatgtgtacgacttattgcaacacaccagtctgtcgattgtcggtgagatgactgtcactatcgatcactgcgtgctggtttccggcgctacagatctgaataccatcgaaacggtgtacagccatccgcagccgtttcagcagtgcagtaaatttttgagccgctatccgcactggaaaatcgactataccgagagtacgtcggcagcgatggaaaaagtcgcgcaggcaaactctccgcgcgtcgcggcgctcggcagcgaggcaggcggcatgttgcacggattacaggtgctggaacgcatcgccgcaaaccagacgcagaatatcacccgctttctggtactggcgcgcaaagccattaatgtttccgatcaggttccggcaaaaaccactctgttaatcgccaccgggcagcaagctggcgcgctggtcgaagcgctgctggtgctgcgtaaccacaatctcatcatgacgaaactggagtcgcgccccattcacggcaatccgtgggaagagatgttttatctcgatattcaggcgaacctggagtcgcaggtaatgcaaagcgcgctaaaagagctgggcgagatcacgcgctcaatgaaagtgcttggctgctatcccagcgaaaacgtcgtgccggtagaacctgcctgacgttcaataaaacggcttttcttcatccctgcgacggctacctgcagggtgaagatggcgccggagagcggataatccgccacttcctgagcagacatattttctctggtagttgtaataaacagcgttttcatatctgcgccgccaaagcaaaccatcgtcggacaacgtaccggcaaccggtactcttccagctgctcttcttgcggtgagaaacgcgccacgcgccagccgtcaaacatcgcgctccagtagcacccttcgctatccatcgccgcgccgtcgggaagtccttctccttcgccaaaatggcgaaaaagttcacgcttgcccggatcgccatgcttatcaagtaacgtgcggtatatcacgccattcggcgtatcggaggtatacatccactggttatccgggctgaacgccaggccgttgtgtccctggatatcgcactggatcacttttgccgtcaggtcatgatcgatccgcatcagcaacgcgccattatagtcacctggcgcccagaacgttccggcataaaaacgtccatcgccatcagtgccgccatcgttaaaacgcgccagtttcgtattagagggattgtcgcaaaccttacgctgcaataatccatttttatcggccagccagatagcatgacgcatggccacaataaatccgccctgctcacgcaaggcaaaacagcccacctcttccggaaacaccagcacgctatgcgtcccactcgccggatggtaacgatggatctcctgttccaggatatcggtccaatacagcgcgctttcatcctcgctccatgtggggcattctggtagatgtccgacataatcaaataaaacgtgcggcgtagtcataacggttccttaaacgaaaaaagccagcaaagctggcttttagtatagatgtcatcattatggtcggctgtcattcgcctgacgcaataacacacggctttcattctggaagcgtctggcataatcgccaaaccagtgttcaactttgcgaaaactgtcgataaaagcctgcttatcaccctgttccagtaacccgatcgcatcgccaaaacgtttatagtaacgcttgataagcgccagattgcgctccgacgacataataatgtccgcatacagttgcgggtcctgggcgaacagacgcccgaccatcgccagctccagtcgataaatcggcgatgatagcgccagaagctgctcaagctggacgttctcttccgccagatgcagcccataagcgaaggtagcaaagtggcgcaacgcctggataaaagccatgttctgatcgtgctcgacagcgctaattcgatgcaaccgcgcgccccacacctggatttgctcaaggaaccactgatacgcttccggttgacgcccgtcacaccagaccaccacctgcttcgccaggctcccgctgtccggaccaaacatcggatgcaagcccaacacggggccatcatgggccgccaacattgcctgcaacggaccgcttttcaccgatgccagatcgaccagaatacagtcggacggcaggggcggcagttgcgctatgacctgttcagtaacatgaatcggcacgctgacgatcaccattccggcatcggcgacaatgtccctggcgcgcggccagtcctgctgttccagaatacggacctgatagcccgacagcgtgagcattttttcaaacagacgccccatctgtccgccgccgcccacaatgacgaccggacgcagagaaggacaaagcgttttgaaccccttatcattttcgctggagtaagattcacgcattacccggcgcaggacatcttcaatgagatcgggcgggacaccgatcgcttctgcttccgcccgtcgtgaagccagcatagaggcctcacgctccggcacgtaaataggcaggccaaaacggcttttcacctcgccgactttggcaaccagttccaggcgcttagccagtaaattcaacaacgctttatcgacatcatctatttgatcgcgtaatgcggtcaattcagcaaccataacaacctcttatgcgacgcgcaccgccagctggccgctcaaatctttatgaatttcacgtaacagggcatcggtcatctcccagctaatacaagcatcggtgacggaaacgccatacttcatttcgctgcgcggctgttcggaagactggttaccctcatgaatattactttcaatcattaagccaatgattgaacgattgccatctttaatctgcgcaaccacagattcggcaacggctggctggcggcgataatctttattggagttaccatgactgcaatctaccatcagcgaaggacgtagtcccgcctgttccatctctttttcacactgagcgacatctgccgggctatagtttggcgctttgccgccacgcagaatcacatggccatgcggatttccctgggtttgcaataacgcaacctgaccggcctggttaatgccaacaaaacgatgaggttgcgcagcggcgcgcatggcgttaatcgctgtcgccaggctgccatccgtgccgtttttaaagccgaccggcatagaaagaccagacgccatttcgcggtgggtttgcgattcggttgtgcgcgcccctatcgccgaccagctaaacagatcgcccaggtattgcgggctgttcggatccaacgcttcggtcgccaatggcaaccccatattcaccagttccaccagtagctgacgcgctattttcaacccggcttccacatcaaatgagccatccatgtgaggatcgttaatcagccctttccagccgacggtagttcgcggcttttcaaaatagacgcgcattaccagatagaggctatcgctgacctctgcggcaagggctttaaatcgacgggcatattccagagcggtttcaggatcgtgaatagaacaaggaccgcataccaccaacagacgcggatcgcgcccggcaataatgtcagaaatgattccccgggactgcgctatctgcgcttcctgcgccaggctcaagggaaaggccgctttaagctgctccggcgtcattaatacctgttcatcggtgatacgtacgttattcagcgcgtctttttgcatgatggcgatcctgtcttttcttgtttgcgatagttgatcctccacgaggatgtttaaaccataccacaaaaagtaaagatttcaatccatattacgtaaaataaactttacaccatgcgcaatcgtcgattaatctccctcatttcgtatcaaaaactttacacaacaagtgaattattttattcccagcctcagaaaagcggtaaaatgagcgatgctcgctattttttgattattttttctccgcacacatatttttactttctgatatagggtgattaataccattatcacaagaatttaatatcagggatatcacttaaattattcatattatcaataagacataatgacgatatggcaaaataatgttattttgctacaaacaatcacggatgtattttaatgctttacgactgaagatggtggggacttgttaatgcgtttttctcaccgatttatccttctgttatcgctattattagcaagcttgcctctgtatgctcaacgcgtcacggaagaagagaaatccgtacgcgccatcgtctccggtatcgtcagttatacacactggccggcgttatccgggccgccaaggctatgcatattttcatctgcgcgttttgtcagggtacttagcgaagaggctgactgggctttcccttatcaaccgcttgtcatccgtaccacacaagaagccctgagcgcccgctgtgatggtttttactttggcaatgaatcgccagcttatcaggtggagttaacgcgtcattatccagttaatgccttgttattaattgccgagcaaaataccgaatgtattattggcagcgcattttgtctgatcattaacaatgatgaagtcaaattttccgtcaacctggactccctctcgcatagcggcgtgagagtaaatccagaagtattaatgcttgcacggaatcaaaagcatgaataaggaattttctctgtccaggccaacatttaaacgcacactacggcggattagtataatcagcgtgctgcttacaatgacattgatctggctattaatttgcgttgcgtctgtccttacgctcaaacagtatgcgcaaaagaatctcgatttgaccgccgccacaatggcccatagccttgaagcggcactggtattttccgataacgcggccgcagcggaaacgctcgccacactgggacgccagggacaattttcagcggcggaggtccgcgataaaaatggccgtactatcgcctcatggcgctatgatgcgcgagccgcagacgataagctcattggcttaattagccactggctttttccattgccggtatcacaacccgtctggcacaacggcagggccatcggcgaagtacggcttgtcgcccgcgacagccttattggtcattttatctggctatcgctggcagtgctgacaggatgtattctgctggcatccggcattgccctgctgctcacgcgttatttacacaatggcgttgtggatgcgctgcaaaatattactgaagttgtacacgacgttcgcactaaccgaaatttttcacgccgggtacctgatgagcgtattgcggaatttcacctgtttgcgcaggatttcaatagccttctggatgagatggaagaatggcagctacggcttcaggctaaaaatgcccagttactacgtaccgcgttgcacgatccgctgacggggcttgccaatcgcgcggcatttcgcagctgtattaacgcgctgatgaaggacaattccgctcgtagcagttcggcattgttatttctggatggcgataactttaaatatattaatgatacctggggacatgcggcaggcgaccgcgtacttatagaggttgccaaaagattagcggaattcggtggtagccgttatcagacttaccgactcggcggcgatgaatttgcgatggtgctttacgatgtacattcggaatatgaagtacaacgtatttgcgcagcgctatcccaggcgtttaatcgaccttttgaactgcataacggccagcgaataacgatgaccctgagtattggctttgcgctgacatgggaacatgccactgccgaaaaactacaagaactggccgatcgaaatatgtatcaggctaaacaccggcgtgcggagcgctcgctaaactaaggaacgggcctggccgtttctgactcagcgttgagaccactgacccagcctaatcatgcaaccatctatggcgtggagcaaacccataaaaaaggggccagcgtaatgccagccccttcttttctacaagctttcggatgttgcgaaagcgcgttcttagttaagacgctctttgatacgagccgctttaccagtacgctcacgcaggtagtacagtttagctttacgaacagcaccacgacgtttaacagcaatgctgtcaactaccggagagtgagtctggaagacacgctcaacgccttcgccgttggaaattttacgaacagtgaatgcagagtgcagaccgcggttacgaatagcgataaccacgccctcgaatgcctgcagacgtttcttggtaccttcaacaacccatactttcacttccacggtatcgcccggacggaaggaaggtacgttctgcttcatctgctcttgttcaagttgcttaataatgttgctcataatttaatctcttatcctgggtaaactgatattcggggcctatgccatcccatcatgtttatgctgctgttgtgcgtgttctgttttgaactccgccagcaaccttgcttgctcttcagtcagagccaggttttccagaagttcaggtcttctaagccaggttcggcccagcgactgtttcaaacgccagcgacgtatctcagcatggtttcccgacagcaatactggcggtacttccatcccctctaacacttcagggcgcgtatagtgcggacaatccagcaacccatcagcaaacgaatcttcgattgctgatgcctcatgccccagaacccccggtataaaccgggcgacggagtcaatcagcgtcattgccggtagttcgccaccgctgagaacgtaatcgccaattgaccattcttcgtcaatttcggtctgaattacgcgctcatctacgccttcgtagcgaccacacaccagaataagcttctgattcgtggccagctcgctaacgcccgcttgatcaagcttgcgtccctgaggcgacagataaatcactttagcgccttcacctgccgcggcttttgctgcgtgaatggcgtcccgcaagggttgcaccatcattaacatccccggtccgccgccgtaaggacggtcgtccacggtacggtgccggtcatgcgcgaagtcgcgaggactccagctttggatgttcagcaggcctttttttactgcccggccagttaccccgtaatcggtaattgcgcggaacatttcaggaaacaggctaactatgccaataaacacaagccaatccccataacgccatttattaccgtttattcggtggtttaaaaaccaggatcccagtctacttcgatagtacgagtagcgagatcgactttcttgataacctgcccatcgaggaacggtactagtcgttccttgataccaaatgcatctttcaggttcgccttaatgacgagaacgtcattcgacccggtttccatcatgtcgataactttaccgagatcgtagccttcagcggtgactacctggcagcccatcaggtctttccagtagtagtctccctcctcaagcgcaggaagttgcgaggaatccacgacaatttcgcaattggtcagaagattcgcggcatctcgatcgtcaacgcctttcagcttgatgatcagatcctgattgtggtgcttccagctttccagctgtacctgctgccactgacccgccttctggataaaccagggctgatagtcaaaaatgctttcggcgtcttcagtggaggaaaacactctgagccaaccacggataccgtatgaagaacccattttccccagtacaaccggttcagcgggtacttgtgcggcgagttgcttgctcatcatgaccaccgtgacagattaagctgctttttttacttctttgatcagcgccgcaacgcgatcggaaatggttgcgccctggccaacccagtgagcgatgcgatccagatccaggcgggtgccttcttctttttcgctagcgattgggttgaagaaaccaacgcgctcaatgaagcgaccgttgcgtgcattacggctgtcggtgacaacaacctggtagaacggacgctttttagcgccgtgacgagctaaacgaatagttaccataacatcctcttgtgtgaataaaacaaccgggccccatcgaggaacggagcccggcgtcatattaaaagcccgaaaattttactgatttctgggaaaaaagcaatcaacatgtgatgaagcttgattccagggcgtgaccgttgcagccagtttggcgtcggcgtgcgcgcagaaagcggagcgtacacgcagtacgtgagcatttactcgctccgctcgcccttcgggccgccctaaagggcgttcaaaacactatcgtgttttgtcgagcacactccggcgtcaaaatggcaaataaggtagcccgatatatttatctacccgggaagcctggcggcatcatccccttcatactccgcatcatcttcgccatcccgcccttcttcatcttcttcatcatgcgctgcatgtcgtcgaactgtttcagaaggcggttaacgtcctgcacctgcatcccacagccctgcgcgatacgacgcttgcgggaacctttgatgatttccggcttcgcgcgttctttcagcgtcatcgaattgatgatcgcctccatacgcaccagcaccttgtcatccatctgcgatttaacgttgtccggaatctgccccatgcccggtaatttgcccatcagactggccataccgcccatgtttttcatctgtttgagctgttccaggaagtcgttcaggtcgaaaccgtcgcctttcttcagtttggtcgccagcttctcagcctgtgcgcggtcaactttgctttcgatatcttcgataagagacagtacgtcgcccatgccgagaatacgcgaggcgatacgatccggatggaatggctccagcgcgtcggttttctcgccgacaccgaggaatttaatcggcttgccggtgatatgacgaatagagagcgccgcaccgccacgcgcatcaccatcaactttggtcagcaccacgccggttaacggcagcgcttcgttaaaggcttttgcggtattcgccgcatcctgaccggtcatcgcatcgacgacaaacagcgtttctactggcttgatagaagcgtggacctgtttgatttcgtccatcatcgcttcgtcaacatgcagacgaccggcggtatccaccagcagcacgtcgtagaatttgagcttcgcttctttcagcgcggcgttgacgatatcaaccggtttctggccgacatcagacgggaagaaatccacgccaacctgctcagccagcgtttcgagctgtttgatcgccgccgggcgatagacgtcggcagagacgaccagcactttcttcttgtgcttctcgcgcaagaatttacccaacttaccgacgctggtggttttacccgccccctgcagacccgccatcaatactacggctggcggctgcgcagctaaattcagcgtctggttctcttcgcccatcgccgcaaccagttcgctacggacaatcttgacgaactcctgccctggggtcaggctcttgttaacttcatgaccaaccgctttctcttttacgcgattgatgaactcacgcactaccggcagcgcaacgtcagcctccagcagcgccatgcgcacttcgcgcagcgtctctttaacgttgtcttcagtaaggcgcccacggccactgatattgcgcagcgtgcgcgacaaacgatcggttaaattatcaaacattgtctctcgcctggggtggaaacggttggtcgccgcagcgacacagttacagaatttcgccacagtataccatgaagccgtctttgttgttatgcaacggttggagctgcggtcacgtaacgctatactgcttctctttctcactggtcaactgtcgacacaactatgcccgtttttgctttacttgcccttgtcgcctactccttcagcctcgcgctgatcgttcccggactgttgcaaaaaaacagcggctggcggcgtatggctattctttctgcggtcatcgcgctggtgtgccatgctgtcgcgctggaatcgcgtattctgcccggcggcgacagtggacaaaacctgagcctgctgaatgtcggttcgctggtcagcctgatgatctgcacggtgatgaccattgtcgcgtcgcgtaatcgcggctggctacttctgcctattgtctatgcttttgcgctgattaacctggccttcgccacgttcatgcctaatgaatatattacgcatctggaagcgaccccaggcatgatggtgcacatcggtctgtcgcttttctcttacgcgacgctgataatcgccgctctgtatgcgctacagctggcgtggatcgactatcagttgaagaacaaaaagctggcgtttagtaatgaaatgccgccattgatgagcattgagcgcaaaatgtttcatatcacgcagattggcgtcgtactgctgacccttactctgtgtaccggcctgttttacatgcataacctgttcagtactgaaaatattgataaagccgtgctctctatcgtggcatggtttgtctatatcgttctgctgtgggggcattaccatgaaggctggcggggtcggcgggtcgtgtggtttaacgtcgcaggcgcgggtattctgacgctggcctattttggtagccgcatattacagcaatttgtaagctaagcttttaaaggagtttcccctggaacacatctccaccaccacgctgattatcatattaatcatcatggtggtcatctcggcctatttttccggttccgaaactggaatgatgacgctaaaccgttaccgtttacgccatatggcgaagcaaggtaatcgctcggcaaaacgggtagaaaaattattgcgtaaacccgatcgactgataagcctggtgctgatcggcaataacctggtcaacattcttgcctcggcgctcggcacgattgtgggtatgcggctttacggcgacgccggcgtggctatcgccaccggggtactgacgtttgtcgtgttagtttttgctgaagtcctgcccaaaactatcgccgcgctctatccggaaaaagtggcctatcccagcagcttcctgctggcgccgttacagatactgatgatgccgctggtgtggttacttaacaccatcacccgcctgctgatgcgtctgatgggaattaaaacggacatcgtggtcagcgggtcgttaagcaaagaggaattacgcactatcgtgcatgaatcccgttcgcaaatctctcgccgcaatcaggatatgctgctgtcggttctcgatctggaaaaggtcagcgtggatgacatcatggtgccgcgtaatgaaattatcgggatcgatatcaatgacgactggaagtctatcgagcggcagctcacccactcgccgcacggacgcattgtgctctatcgcgattcgctggatgacgccatcagtatgctgcgcgtgcgtgaagcctggcggttaatggccgagaaaaaagagttcaccaaagagatgatgctgcgcgccgccgatgaaatctattacgtcccggaaggtacgccgctcagtacgcaactgattaaatttcagcgcaataaaaagaaagtcggactggtcgtcaacgaatatggcgatatccaggggctggtcaccgtggaagatattctcgaggagatcgttggcgacttcaccacatcgatgtcgccgacactggcggaagaggtcacgccgcaaaacgacggttcggtcattattgacggtaccgccaacgtccgggaaatcaataaagcgtttaactggcacctgccggaagatgacgcgcgcaccgtcaacggggtgattctggaggcgctggaggaaattccggttgctggcacgcgcgtgcgcattgagcagtacgatatagatattctcgatgtacaggaaaatatgattaagcaggtaaaggttgtaccggtaaaaccgctgcgcgagagtgtggcggagtaacacaatggcgaactccggttcgccttttttatcgccgtcttttaagattccatcaattcctgccatttacttaacaatgcaataatgtcttttcaggcattcagaaaggatattgatgttatgtcagaagattatgtaattgaatgggataagaattttgcagacgacctcaacgtcgtcgccaacgtttttttatcacacaacccaaccttatggcccactattttctctcaactttcgacgcaacctgaaatctttgaagacgaagatgaagacgaatatgggttgcaggacgtcctggattgtagcggtggcgatctcggaaataacgagctggcacaggcatttttacaagttctacgcggcgaaggatttattcacctcgttgactggaaaggtgaagatgaagaaggcgaactggctaattttgccgcagatcgcttttatgaactcacaaaaaacctgacggattctgaggaattaagaaatcttcttgtcgaaataacccaagaggatgaaatctccgatgtctgtgaagccggggaccgttaccttgacgagatctttgaacgcatccagaccgaactcaataagaggggcttccagatttttgatctgaatgaaggatctgacacctataatgtggtcgttctgccaatgagcgaatataaaaaaatagaggacttcaacacgccgtggctggaagtgcaggattttttaagctaaaaaaatggccgactttacatcggccatcaaacttttacttcgccttcgctacagtcaccatcgccgcgcgaatggtacgaccgttcagcgtatagcctttctgcataatacccagcacattgcctgccggaacctcttccgactccaccatcgcaatcgcctgatgcacgttcgggtccagcggcacgttggtctcagcaatcacttccacgccgaatttacgcaccacatccagcatagacttcagcgtcagctcaatcccttcgaccattgccgccatatccggattggctttgtctgcgacttccagcgcgcgatccaggctatcgatgaccggcagcaattcgttgacgaacttctcgagagcgaatttatgcgctttttcgatatcctgttcagtacgacggcgcaggttttccatttccgctttgatgcgcaacacggtgtcgcgttcgcgagtctgggcttctgcaagctgaacttccagattcgcaattttttcatcgcgcggatccacctgctcagcagaatcgtttggttcaactgcctcaacctcttcgtgctgatccatgataatttcttccggggcttgcccctcaggcgttttctgttctttactactcatgaatttctccgcgtttttttcgcattcatctcgctaacttcgcttattatggggatcagattcagggtttcaagggaagtactcacattgtcatcaatcttcgctacaaggacctcagaaaaatgaataatcatttcaagtgtatcggcattgtggggcatccgcgtcatcccaccgcactcacgacacatgaaatgctctaccgttggctatgcgatcagggttatgaggtcattgtggagcaacaaatcgcccacgaattacagctaaaaaatgtgccaaccggcacgctggcggaaattggtcaacaggcggatctggcggtagttgtgggcggcgacggcaatatgcttggcgcagcgcgtacgctggcgcgttatgacatcaatgtgattggcattaaccgcggtaatcttggcttcctgaccgatctcgatccggacaacgccctgcaacaattatctgatgtgctggaagggcgctatatctccgaaaaacgttttctgctggaagcgcaggtctgccaacaggaccgccagaagcgtatcagcacagccattaatgaagtggtgctgcatccgggaaaagtggcgcatatgatcgaattcgaggtttatattgatgaaaccttcgctttttcacagcgatctgatggtctgatcatttctacgccgaccggctccaccgcctattcgctctccgcaggcggccctattctgaccccttcactggatgccatcaccctggtgccgatgttcccgcataccttgtcggcacgcccgttagtcattaacagcagtagcacgattcgtctgcgtttttcgcatcgccgtagcgatctggaaattagctgcgacagtcagatagcgctgcctattcaggaaggagaagatgtgctgattcgccgctgcgactaccatctcaacctgatacatcccaaagactatagctatttcaatacattaagcacaaaactcggctggtcaaaaaaattattctaattttacgttagcctctttactgtataaaaaaccagtttatactgtatttaattacagtcatggtttttcatacaggaaaacagctatgttggcgcaactgaccatcagcaattttgctatcgttcgtgagcttgagatcgattttcagagcggaatgaccgtcattactggtgaaaccggcgcgggtaaatctattgcgattgatgccctgggtctgtgtctgggcggtcgcgctgaggccgatatggtccgtaccggagcgacccgcgccgatttgtgtgcccgctttgcgctgaaagacacgcctgcggcattgcgctggctggaagaaaaccagcttgaagaaggtcgcgaatgcttacttcgccgcgttatcagcagcgatggccgctcacggggctttattaacggcaccgctgtgcccctgtctcaattgcgcgagctcggtcagttgctgattcaaattcacggccaacatgcgcaccagcagcttaccaaacccgaacagcaaaaatcgctgctggatagctatgccaacgaagccgctttagcgcagcagatggctgctcgctaccaattatggcatcaaagctgccgcgatctcgcccatcaccagcaacaaagccaggaacgcgccgcgcgcgcggaactgctgcaatatcagttaaaagagttgaacgactttaatccgcaggccggcgaattcgagcaaattgacgaagagtacaaacggctggccaacagcgggcagttgcttacgaccagccagaacgctctggcgctactcgcggacggcgaagacgttaacctgcaaagccagttatatagcgcaaaacaactggttagcgagctggtaggtatggacagcaagctttccggcatcctggatatgctggaagaagccactatccaactcaccgaagccagcgatgaattacgccactattgcgagcgtctggatttagaccccaatcgcctgtttgagcttgaacagcgcatcgctaaacaaatttcgctggcgcgaaaacatcacgtcagcccggaagcgctgccgcagctttatcagtcactgctcgaagaacagcagcagctcgacgatcaggccgattcgctggaaacgctaacgctggcggttaataagcatcaccaacaagcgctggaaacggcgcaagcgctgcatcaacagcgtcagttttacgcccaggagctggggcagttgatcactgaaagtatgcatttactttcgatgccgcacggtctgtttactatcgacgtgaaatttgatgagcatcatctgagcaacgacggcgccgatcgcgtggagtttaaagtgacgacaaacccaggtcagccgctgcagcctatcgctaaagtcgcgtctggcggtgaactgtcgcgcattgcgctggctattcaggtgattaccgcgcgcaaaatggaaacgccagcgctgatttttgacgaggtcgatgttggcatcagcggcccaaccgccgccgtggtcggtaaactcctgcgtcagcttggcgaatccactcaggtgatgtgcgtcactcacctgccacaggtagccgggtgcggtcaccagcacttctttgtcagtaaagaaacagacggggcaatgaccgaaacccatatgcaacctttggataaacgtgcgcgtttacaggaactggcccgcctgttgggaggaagtgaagttacgcgtaatacgctggcaaacgcaaaagaactgctggcggcgtaaacttttttatctcccgaaggtctgagttcacaacaaaaacgccgtaagacccgacagcaaaaggttttaaagtgatgaaaggtctattatcatcggcatattaatatgagccacgtactgctcaggcccgaaaaggaacccaatcactatgcgctgtaaaacgctgactgctgccgcagcagtactcctgatgttgaccgcaggctgttccactctggagcgagtggtttaccgacctgacatcaatcaggggaactatcttacacctacggatgtcgccaaagtgcgtgttggtatgacgcaacaacaggttgcgtatgctttaggcacgccgatgatgaccgatccttttggtacgaacacctggttttatgtcttccgccagcagccaggacatgagaacgtgacgcagcagactctgacgctcacctttaacagcagcggcgtgttaaccaatattgataacaaaccggcgttgacgaagtaattttgtgataccgcctgatgaggttacgttcatcaggcctgcaaacctctcccccgccatttggtacgaatttgcctgatggcgctacgtttatctggcttacaggcacgcctgtgcttcaggtgtggtacggctttcacaccgttatccggcaaaagaggctaattatctaccagccgatttttcggcgcgctggcggcgtaatgcttttggatcggcgattaagggacggtaaatttcaacccgatcgccatcctgcaccgtatcggtgagttttaccggacgactgtagatacctactttatttttcgccagatcgatatccgtgcgcaattccagcaagccggaagcgcgaatcgcctcttcgaccgtcgcgccctcctccagcgttacgcgctgcaaatactgcttttccggcagcgcataagccacttcaaccacaagtttatccggcacggtaaacctctttggcgcgaaccgtaaacgcctgcaccatgttggacgctaactctttgaatatacgaccaaacgccagctcaatgagtttattggtaaactcaaaatcaagctgaaactcaatacggcacgcctcggggctgagcggggtaaatttccagccgccgatcagctttttaaaggggccatccaccagatgcatcagaatgctctggttacgcgttagctgattacgcgtcgtaaacgtcttgctgatacccgccttcgacacgtcaacagccgccgtcatctgtgctggcgatgactccaggacgcgactaccaacacacccaggcaaaaactggggatacgattgcacgtcattcactaactgatacatctgttccgcactgtaggggactaaagcagtccgactaatctgaggcatagcaattcccatcaacataaatcgtgtaaataataccacttatcagcgagtaaaaaaaatgctgtccccaaccgtcatgccttaattgtgcgtgcatagcccaactcatgctaagatagatttttgcacctcatcaggacgtaatggggtgttttcgatatcagattacctatgaattcacgacacttatgacgaagaaaaaagcacataaaccgggctcagccaccatcgcgctgaataagcgcgcccggcacgaatactttatcgaagaagagttcgaggctggtctcgccctgcaaggctgggaagtaaaatctctgcgcgcaggaaaagccaatatcggcgacagttacgttatcctcaaagatggcgaggcctggctgtttggcgcaaactttacgccgatggcggtcgcctcgacacatgttgtatgcgacccaacccgaacccgcaaactgttgttaaatcagcgtgagcttgattcgctgtatggccgtattaatcgtgaaggttatactgtcgtcgcgctttctctgtactggaaaaatgcctggtgcaaagtgaagatcggcgtggcgaaaggtaaaaaacaacatgataaacgttccgatcttaaagaacgtgagtggcaactggataaagcacgcattatgaaaaatgcaggccgataatagacattttttgtgaccagcttctcagtatgaagctggtcaatgttcatatctcatgcatgcctcgaaaatatattctctgtgtctgacgcttatcaatagcaataaataccacaacaagaatatattctttgtttaaaaatttttatagtctaataacacaatacttcaaatgatttttataaaatttaatattgctgaataccttcacaaaaagtattgtttttatgttaaaagagaaaaagaagaaaaaattaaaattcattataaaacataaagataaataaaaaattatcatgtattgttagcccaccctacatctccttaacacaaactccgttatatttcagacgcactaacacctttatcaatagatcttaatttgcagaaagatttttttctgactatatcatctaatacgaaagcactagtcaggcacaaaaaacaaagggttattcggcgagaaaaccagacctccacctacgctcataaaaaagaatatggctacggaaattcatctctcacgatgaacgggaaggctcgtctacgcattttgccctgaacgttgtgcccgttaattaatacacagagcaaatccatcaggagctgatttatgcgtctactcgccgtggtttcgaaattgactggcgtctccaccactgtggaatcctcagcggtcactcttaacgccccgtcaattgttaaattatcagtggcccgggaggaaattagtcaacttacgcgcattaatcaggatctggtggtgaggctccattccggcgaaacgatcacgattaaaaacttttacgttaccaacgatctgggcgcaagccagttagtactggcggaaaacgatggcacgttatggtgggtagaaaatccgcaagccgggctacattttgaacaaatcgctgatattaatgagctgctggtcacttctggcgcttcccatgaagcaggcggcgccgtttggccgtgggtactggctggcgcggtggcggctggcggcattgccgctatcgcgtcttccggcggcggcgattcccaccatcattcggatggcgataatccgccccccgataacaccaatcctgacggtaatccccctgataacagcaatcccggcggcagtacccccaacggcaatactccaggtagcagtaatcctgtagatactaccccgcctctcgctcccggcgaattattgatttcagcggacggaaaaacggtaagcgggcaagccgaagcgggcagtaccattaccatcaaagatccctcaggcaacgtcgttggcgagggcaaagcggatagcgacggtaaatttagtattgatctgacagcgccacagattagcggcgaacaacttaccgtgaccgcgactgacgatgccggcaataccggcccatcggcaaccattgatgcgcccaacattcctctccccgatacaccggttatcaccgccgctatcgatgatgccgctcccctcaccggcacgctgagcaataatcagtttacgaacgacaatacccccactctggagggcaccggcagcgcaggcacagtcatccatatttacgccaatggtcaggaaataggctcaacaacggttgataccagcggaaactggcattttgccattaccagcgcgctagcggatggggaaaatcatttcaccgccattgcgactaacgtgaaaggcgaaagtagcgaatcagcccgctttacgctgactatcgacacactcatccccgatgccccacgtgttgaactgattgccgataacaccagtttgctcaccgggccgctacagaataatgaccgaactgacgaggcaaaaccgctattttccgggcagggagacgcaggcaataccatcacgattaaagaaggttcaaccgttatcggcagcgctaccgtagacgaaaatggacgctggacctttacgccgactacgccgttaagcgatggcgaacatacctttaccgtcgaacaaagcgacaaagccggaaacacgagccgcgtgacgacaacgcctactatcattgtggacaccacgccgcctgacgccgctatcattgataatgttgcgaaagacggcacaaccgttagcggcaccgctgaagctggcagtactgtgtcgatctatgacccggcgggaaattacctgggctccacgattaccggagaaaataaccacttcagcatcacgctgaatccggctcagacccacggcgagcgtctggaagcgcgtattcaggacgccgtcggtaacatcggccccgccacggagtttaccgcttctgactcacagtatcctgcccagccgactatccttaccgtgacggatgacgctggcgccgttaccgggctgctgaaaaatggcgatgccacagatgataaccgcccaaccctcagcggtactgctgaaccaggcagtacgatatcgattaacgataatggctttcctgtagcgacctttccgcccattgtcgctgacgctgacggcaaatggagctttaccccctcgctggcgcttgccgatggcgaccatgtctttaccgctaccgcgaccaacgatcgcggcaccagcgggcagtccgtctcctttaccattgatatcgacacgcagccgccggtgctggaaggcctggcggttagcgacgtcggcgacagactcaccggcactacggaagctggcagtactgtggttatcaaagacagcctgggaaatacgctcgggagtggaacggcaggcgacgacggtaccttctcaataggtattagcccggcgaaaattaacggcgaaacattaagcattagcgttaccgataaagccgcgaatagcggtccggtagaaacgctgaacgcgccggataaaactgcgcctgcggcaccggacggtcttaccgtggcgaccgacggtctgtccgtaagcggtcaggcggaagccggggcaacggtcactatccgcgacagtagcaacaccgtacttggcagcgccgtcgctaatggcaacggacaatttatcgttccgctgaatacggcgcagactaacggccaggcacttatcgctaccgccaccgatgtcgcgaaaaacgaaagcgccgccgcgacggttatcgcgccggacagtaccgcgccggaaatgccgaaaaacgtggtaattagtgaggatggcaccagtatcagcggcaccgccgaaccgggtagcgccatcacgatcgccacgccggacggcaagccgcttggcagcggcaaagcagatggcgaaggtcattttacccttcccctcgtccccgcacagaccaacggcgaacaggttaccgtcaccgccaccgacagcgccaacaacgtcagcccgccaaccacagcgcaagcgcccgatatcaccgccccggataagcccattatcactcaggtactggacgatgttgaaagcttcaccgggccgctggttaacggacaaaccaccaacgacaaccgtcccacccttagcggtacggcggaggccggcgcgcgtgtcgaagtctttgataacggcttttcactgggactcgccacgctacagcccaacggtgcctggacgtttacgccgtcgcaaaatttaggtgaaggcgcgcatcgactgaccgtaatcgcaaccgacgctaaaggcaatgccagtcaggccgcgtcattcgacctggtggtcgatacgcaatcgccgcagcaaccggtaatcaccttcattacagatgatgcgccgggtattctcggtagcgtcgcgcatctggggctcactaacgacagcacgccaacgattaatggtacaggtgaaccgggttccacagtacacctgtatcagaatggcgcccggatagcagatattatcgtcggtaattccggcgtctggagctacgcttacaccacggcctcgccactggcggacgacacctacacctttaccgtgacggccagcgacagtaacggcaacaccacgcctttttcgaccgattttacgattaccattgatacccaggcccctgccgcccccggcgttatcggcgtagctgacggcgacggaaatacgattgataccaatcagattacccaggaatcccagccccggttgagcggtagcggcaccgcaggcgacacaatcatcctttacgataatggcaatgccataggtcaggcgctggtcggcacggacgggcgctggcagtttacgccgcctgccgcgctgggcgacggcgaccaccttctgaccgctcgcgccaacgatccggcggggaacgaaagtcccgaatccatcagctttaccctacgcatcgatacccaggcgccggatgcgccgcagatcgtgtcagccgccatcaccggcggagaaggcgaggtgctactggcaaacggcagtattaccaatcagcgtatgccgaccctcagcggcaccggcgaacccggcaccatcatcaccctgtacaataacggcgtagaactggctaccgtccaggtcaatccacagggtagctggacctatccgctaacccgtaatctgagcgaagggttaaacatcctgacggccaccgccacggatgccgcaggcaatagtagcccgacctccggcgttttctccgttacccttgatacccagcctccagcgcagcctgacgcgccgctaatcagcgataacgtcgcgccggttattggcaacatcggcaataatggcgcaacgaacgataccacgccgaccttcagcggcacgggagagatcggcagcacgataattctctacaataatggcagtgaaattggtcgcacaacggtaggcgataacggtagctggaactttacgcctgcggcactgacgccagaaacctataccattaccgtcacggaaaccgatagagcgggcaatatcagtccaccttccgcctcagtcacttttacgctagacaccactgcgcccgccaatccggttatcacttttgccgaagataacgtcggcgaagtccaggatactattgtcagcggcgcaaccactgacgacaatacaccggtcattcacggcactggcgacatcggcagcattattacgctctataatggcagcagcgttttaggcgtagtcaccgtcgatgagaccggcacctggacgctgccggtgaccagcgcgttgccggatggcgtctacaccctgactgccattgccgccgatgccgccggaaacagcagcggcgtatcgaacagctttaccttcaccgtcgacaccgttccgttgcagccgcccgtcgtcaatgaaatccttgacgatgttgcaccagtgaccgggccattaaccgatggcgcctttactaacgatcggacgctgactattaacggcagcggcgaaaacggcagcaccgtcacgatttacgacaatggcgtggcaatagggacggcgctcgtcaccgacggggtctggacattcaatacgcccgaattatcagaagccagccatgcgctaaccttcagcgcgactgacgatgctggaaataccacggcgcaaacccagccgatcactattaccgtggatatcaccgccccgcccgcgccaacagtccagacggtggatgacgatggcacgcgcgtcgccggaattgccgacccttacgctaccgttgaaattcatcatatcgatggcaccctggtcggcagcgctgtcgctaatggcaccggtgaattcgtcgttacgctcagtccggcgcaaaccgatggcggtacgctgacggcaattgctatcgatcgcgcggggaataacggcccggctacgaattttcccgcttccgacagcggtctgcccgccgtcccggccatcacggcgattgaagatgatgtcgggagcgtacaggggaatattgcggcgggcggcgccacggacgacaccacgccgacgctgcgcggcaccacggatatcggctctaccgttgaagttttcattgatggcgattcggcaggctttgccaccgttgacgccagcgggaactggatctttgagatcgcgacgccattaagcgaaagcacacattacttcaccgtccaggcaaccaatgcgaatggcccgggcggcctgtccgcaccggtcgggatcactgtcgatcttagcgcgccggcgcaaccggttattaccagcgcaacggatgatgtccccggcatgaccggtacgctggataacggcgcgctcaccaatgattcacgcccgacgctcaacggaacgggagaagctggcgccacgatccgcattctggataacggcgtagaaatcggttccgccacggtagatcaaagcggcaactggcgcttcaccccgaacgcgccgctggagagcaacgcgcacatctttaccgccgtagcgaccgatcccgccggcaatagcggccagccttcggacggctttacgctgaacattgacgcgcaggcgccagatgtgccggttatcacctccgtgattgacgataacaatcaaccgaccgttccggtgttaccggggcaatccaccgacgatcggcagccaatactgaacggaactggcgaacctggcgcgacaatcaccatttttgataacggtacgccgcttggcacggctcaggtaggcgaaaacggtagctggaccttcccggtgccccgcaatttgtcagagggaagccataatctgacggttagcgctaccgatccggcgggcaataccagcgcggtctccgcgccgtggacgatcgtggtcgatattacgcctccggcgatcccggttctcacctccgtcgtggatgaccagcccggaattaccggcaacctggttagcgggcagctaacgaacgatgcgacgcccaccctgaacgggcgcggagaggcaggcgcgacgattaatgtctatcttgacggtaatcccgcgtccatcggtaccacgacggtgaatagcgacggcacgtggagtttcacgccgcagacgccgcttgcaaacggtagccacacgttcacccttagcgccaccgatccggcgggtaatagcagcgcggtgtccagcggatttgtgctgacgattgacgccacaccgcccgccgcgccggttatcgccagcgtggcagacaatacggcgccggtaacgggcatcgtccccaacggcggctcgacgaacgaaacccgaccaacactctcgggtaccggtgaggcgggtacaaccatctcgatttataatggcagcgcgctggtcggcacggcgcaagttcaggccaacggtagctggagctttacaccgtctacctcgctgggcgcgggcgtctggaacctgacggcgacagcaaccgatgcggcaggcaataccagcgccgcgtccgaaatacgctcgtttactattgataccacggctcccgccgcgcctgttattgatacggtctacgacggtacgggccccattaccggcaatctgagttcaggacagatcacagacgaggcgcgccctgtcattagcggcacccgtgaaaccaacacaactattcgtctctacgataacggcacgctgctggctgaaattcccgccgacaatagcagtagctggcgctacacgcccgacgcctcgctggcgacgggcaaccatgtaattaccgtcattgccgttgatgccgcaggcaacgccagccccgtttcggacagcgttaatttcgtcgtcgatactacgccgccgctgacgccggtaatcacatcagtcagtgacgatcaggcgccaggcctcggcacgatcgcgaacggccaaaataccaacgatcctacgccaaccttcagcggcaccgcagaagccggcgccacgatcacgctctatgaaaatggtacggtcattggcacgacaacggctcagcctgacggcgcgtggagcgtctccacctcaacgctggcaagcggaacgcacgtcatcaccgccgtcgccaccgatgccgcaggaaacagcagcccgaacagtacggctttcaccctgacggtcgataccaccgcgccgcaaacgccaatcctgacgtccgtggtggatgacgtcgcgggtggggtcacaggaaatctcgctaatggtcagataaccaatgataaccgccccacgctgaacggcactgccgaagcgggcagcgtggtcagtatctatgatggcgacactctgcttggcgtcacctcggctaacgcgagcggcgcgtggagcttcacgccgacgacagggttaaacgacggcacgcgcacattaacagtgaccgccaccgacccggcaggcaacgttagcccggccaccagcggttttactatcgtggtcgatacccttgcgccaacggttccgcttataaccagcatcgttgatgatgtcccgaacaacaccggtgccattggcaatggacaatcgaccaacgacacacagccgacgctcaacggtactgcggaagccaacagcgcggtaagcatcttcgataatggcgcgctggtcgcgaccgtgaacgccaatgccagcggcaactggagctggacgccaaccgccgcgctcggccagggaagtcacgcctatagcgttagcgccgccgatgcggctggcaacgttagcgccgcttcgccatcgataacgattatcgtggataccattgcgcccggcgcgcccggcaacctggtcatcaatgctaccggtaatcgcgtgacgggcaccgcggaagcaggcagtacagtgacgattacctctgagactggtgtggtactgggaaccgccaccgccgacggtacaggcagcttcaccgccacactcacgcccgcgcagaccaatggtcagccgctactggcatttgcccaggataaagcaggcaacacaggcattgccgccggatttaccgcgcccgatacgcgcgtgccggaagcaccgatcatcaccaacgtagtggatgatgtgggtatttataccggcgctatcgccaacggccaggtcactaatgacgcacaacccacattgaatggtaccgctcaggcgggcgccacggtgagcatttataacaacggggcgctgctcggcaccaccacggcgaacgccagcggaaactggagctttaccccgacaggcaatttgaccgaaggcagccacgccttcaccgccaccgcgactaacgccaacggtacaggcagcgtctccaccgccgcgacggtgattgtcgatacgctggcgcccggtacgccgtcaggtacgctcagcgccgatggcggttcactttccgggctggcagaggcaaacagcaccgtaaccgtcacgctgacggggggcgtgacgctcaccaccaccgctggcagcaacggcgcatggtctctcaccttgccgacaaaacaaattgaaggtcaactcattaacgtgacggcgactgacgctgcgggtaacgcctctggcacgttaggcattaccgcgccggttctgccgctggcggcaagggataacataaccagtcttgatctgacctctaccgccgtcaccagcacgcaaaactattcggattacggcctgctgctggttggcgcgcttggcaatgtcgcctcggttttgggtaacgataccgctcaggttgagttcaccattgctgaaggtggtacgggcgacgtcaccatcgatgccgccgcaacgggaatcgtgctttcgctgctcagtactcaggagattgtggtacagcgctacgacaccagcctcggcgcctggacgacgatcgtcaacaccgcccttggcgacttcgcgaatttgcttaccctgaccgggagcggcgttaccctgaacctgagcggcctgggcgaaggccagtaccgggtactcacttataacaccagtctgctcgctaccgggtcatataccagcctggatgtcgatgtacaccagaccagcgcaggtattattagcgggccaaccatcagtaccggcaacgtcatggctgatgataccgcgccgacgggcaccacggtcaccgccatcaccaacgccaacggcgtcagtacgccggtcggcgcgggcggcgtggatatcctggggcaatacggcacgctgcacattaatcaggatggcagttacacctacacgctgactaagcccacggcgggatacggacataaagagagcttcacctacaccatcacccagaatggcgtcggtagcagcgccgcgcaactggttattaatttgggtcccgcgcctgtaccgggcagcgtgatagcgacagacaataacgcctcgctggtctttgatactcacgttagctacgtcaacaacggcccctcgacacaaagcggcgtcacggtattaagcgtcggacttggtaatgtactgaacgcgaatctgcttgatgatatgactaatccgatcatctttaacgttgaagaaggcgctacgcgaaccatgacgttacagggaaccgtcggcggcgtctcactggtttccacgttcgatctgtacgtttatcgcttcaacgatgccattcaacaatatgagcagttccgggttcaaaagggctggattaacaccctgctgttagccggacagtcccagccgctgaccctgacgttgcctggcggcgaatacttgttcgtgctgaataccgccagcggcattagcgtcctcactggctatacgttggcgatttcccaggaccacacctatgccgttgacagtatcaccgccaacaccaccggcaacgtactgaccaatgatgtcgtccctacggacgccctcctcactgaagtaaacggcgtggcgattgcggcgaccggcacaacggaggtaaacgggctgtatggctcgctcatcattgacgcaagaggcaactatacctacacgctgaagaacggcgtcggcgccgacagcattaaaacgccggacagctttatctatacggtcaaagcgccaaacggcgataccgatacggcctcgctcaatatcacgccaaccgccagggcgctggatgcgattaatgatgtcagcgataccctcagcgtcgccacgcttcaggataccgctgcctggctggactccagcgtcggcagcgccagttgggggctactcggcaaatcgggcagcgggagcggcacctttgacgttgcaacgggcaccgtacttaaaggcgcgtcactggtttttgatgtctccacgctcattacgctgggcaatctgaatattagctgggccattcaggagaacgggaccgtcatacgcaacggaaccgttccggtggcgaatatcacgctgggcagcgcgacggtgaccgttaacctgagcggcctggagctggatgccggaacgtacacgcttaactttaccggcaccaataccctggccggggcggcgacgatcacgccacgcgtcatcggcaccaccgtcgatctggataattttgaaacgtccggaacgcataccgttctcggcaatatttttgacggcagcgacgcggcgggggcgatggatcagcttaatacggtgaatacccgcctgagcattagcgggtataacggcagcgccgccacgctggacgccgcggcgaataccaccagcgccacgattcagggacattacggcacattgcaaattaaccttgatggcgcttacacctacaccctgaataatggcgtcgcgatgtcgtccatcaccagtaaagaggtctttacctatcaactggatgacaagatgggtcatacggatagcgccacattgaccattgatatggcgccacaaatcgtcagtaccaaccaaaacgatgttctcatcggctccgcctatggcgatacgctgatttaccacctgttaaacggcgcggacgcgaccggcggcaacggcgtcgatcgctggcaaaacttctctaccgcgcagggcgacaagatcgatatccacgaactgctgaccggctgggatcaccaggcggcgacgctgggtaactttgttcaggttcataccagcggcgccaatacggtgatatccgtcgatcgcgacggcaccggcagcgcgtttaaatcaaccgaccttgtcactctggagaatgtgcagctcacgctaaatgatctgttgcagaacaaccacctgataaccagcggttgataaaaaagccccgaacgccacgacgttcggggcaacaagcggtgatatttaaaagggataaactatgggaagagtcgcgcctgtcgccatcgtactggcatttgctttgtttcatcaccagccccggggcgcagaagcgccgccaatgattacatccgaaggattagcaacggaccagatgcttccttcgctggatggctccgccgctgagttgccgctcagcgccgccgcgccgggcaacctgacgctcaatgacgcggtcaatcgcgccgttaactggcatccttctattcgcgaagccatcggcaaactgctcgcacagaatgaacaaatagaggtcgccaaatcgaaatattatccgcaagtcagcgctggcgtgaacaatgggtacagcaatacctacaccgatcacgggtatagcccctcgctagtgctgtcggtatcgcaaatgctttatgacttcggcaaagtggcaagccaggttcgcgccgaaaccgcaggcgcagcgcagcaacaggccaatgtgttgctcagtattgataccgtcgcgcacgaaaccgccaacgccattgtacaaacgcagagctggcagcaaatggtagaagcggcggaagaacagctcgtcgcgctggacagcatcggtaaacttatccggcagcgcagcgatgaaggcgctacgtcgctctctgacgtggtgcaaaccgaagccagaatcgaatccgcccgctcgcaactggcgcagtatcaggccaatctcgacagtgcgaaagcctcactgatgagctggctgggctggaattcgcttaacggcatcaataatgacttcccggcgaaacttgctcgcagctgtgagacggcgactcccgacgatcgactggtgcccgcggtactggccgcctgggcgcaggccaacgttgcgcgggcgaatctggactatgccagcgcgcaaatgacgccgacgatttcgctcgaaccttctgtacaacattatcttaatgataaatatcccagtcatgaagtgctggataaaacccagtattccacctgggtaaaagttgagatgccgctttatcagggcggagggctgactgcccgacgcaacgccgccagccatgcggtagacgcggctcagtcgaccattcagcgcacccggcttgatgtccgccagaaactgatggaggcgcgcagccaggcaatgagtcttgccagcgcgttacaaatccttcgtcggcaacagcagcttagcgaacgtacgcgcgaactgtatcagcagcaataccttgacctcggttcccgcccgctgctcgacgtgcttaatgcggagcaggaagtttaccaggcgcgttttgccgaactgcaaacggaaagccagttgcatcagttgcaactgaactgtctgtataacaccggcgcgcttcgtcaggcgttcgcgttaaatcatcgcagcattcaatccgtggagatccagccatgacccgcgccgcccccgatgtagaagaggtactcagtgagcgcgcgctaagccaatgggcgcaggccatcagctatgtcgccggtcattatcgcgttgcctgttctcccggttcaattcaggccaacgccccgtggcttaggggtaaaagcagaacgaccgccttaacgcagctcgcgcggcaggcgggtttatcctttcatgcgccggacatagacaaaacggcatttagtcagtggcgattgccgttggttgtcgagctccgggacgggcagttattggtcatcgaacatgttaatggcgaagaggcggtagacgtttttgtgattgaagaagagggtcagcgtaaccgcctgacgctcagcgagttattgccggagatcctctatgttgccgcgctacgcccgctatcggcgctcaaggatagccgcgtcgaccgctatatctcccgctttaaacccgactggatgcgcgagctggttctgcaggatattcgcccttatttaccggtaatggtcgccgcctttctgattaacgtgctgtcgctggccgggattgtgttctctatgcaggtttacgatcgggtgatccccgctcagtcatatcctaccctgtacgtgctctccttcggcgtgctggtagcggtgctgttcggttttctgctgcgtgaagcgcgtacgcacattatggacgtgctcggtaaacgcgccgatatgcgcatttccgatcgggtattcggtcacgcgttaaggctgcgcaacagcgctattccccgttccaccggcagttttatctcgcagttacgcgaactagagcagatccgcgagatgattacctcttcaacgctggcgaccattgtcgatctgcctttctttttcctgtttatgatagtcctggcgattattgccccaccgctggcatggatagcgcccgtggcggctctgctgatgatcctgccgggcgtcgcactgcaaaaaaaactggctgtcctcgccaaccaggccgcccacgaagcgacgctacgcaatgcagtcttggtcgaaagcgttcaggggctggaggatattaaactgatgcaggcggagaaccgctttcttcagcagtggaatagctatatccgtattaccggcgagtcgggtctacgcacccgcaaactcacgcaagggcttatcagttgggggatgtcggtacaaagtctggtgtatgccgcagtgattatgttcggcgcgccgatggttattgaaggcagtatgactaccggcgccgtggtcgccgcgtcgatgctcggctcgcggatgatcgcgccaatggctaacctgtgcggcgtgctggcgcgctggcagcaggtgaaagcggcgaagatgggtctcgacaacattatgcaactgcccaccgagacacagcatgacgatagcctgatacaccgcgacatcctccacgggcattacctctttgaaaacgctcagtttcgttaccataacgacgatcaacgcataccgttgcgcctcgtgcgtctggagatcatgccaggcgagcggattgcgatactggggcgtaacggtgcgggtaaatccacacttttacaggcgatggcgggcggcctggagatgattcagggagatgcccggcttgataatctcagcttgtcgcacatcgatatggcggatttacgccgcaacatcggctttcttagccagaacgcgcggcttttcttcggcaccctacgagagaacctgacgctcggcgcgccgcacgccaacgatgaacagatttttgacgcgctcgaagtcagcggcggcgccgtcttcgtcaggcggctggcaaaagggttggatcatcccattatggagggtggtaacggcctgtccggcgggcagcgtcagtccctgttgctggcgagaatgctgctgcgctcccccaatattgtgctacttgacgaacccagcgcctcgctggacgagcatacggaacgagagtttattcagcggttacatcagtggcttggcaatcgaaccctggtcgtcgcgacgcaccgggtaccaatactggagctggttgagcgtgtcgttgtcctgaaagaaggacaactggtgatggatgcgccaaaagcgcaggcgcttaacgcggatcggatgcaaagtcaccgtcgggagtggaaaaatgaaaatcaatcagcatgatgccgcgatggacgatcccgatattcagcgtgaacgggcgttttccggcgcgggtcgtattgttctgatctgctcactgttatttctcattctcggcatctgggcgtggtttggccgactggatgaggtttccaccggcaacgggaaagtgatccccagttcacgcgaacaggttctgcagtcgctggatggcggcattctggcacagttgacggtgcgggaaggcgacagagttcaggctaaccagattgtcgcccggcttgatccgacgcgtctggcgtccaatgttggtgaaagtgcggcaaaatatcgcgcttcactcgcctccagcgcacggttaaccgcggaagtcaacgacttacctctcgccttccccgctgagctgaacggctggccggatctgattgccgcagagacgcgtctctataaaagccgccgcgcgcagctggccgataccgaagccgagctacgggatgcgctggcgtcggttaataaagagctggccattacccagcggctggagaaaagcggcgcggccagtcatgttgaagtgctgcgcctgcaacgacaaaaaagcgatttaggcttaaaaattaccgatctgcgctcacaatattatgtgcaggcacgcgaagcgttatcaaaagcgaacgctgaggtcgatatgctctccgccattttaaaaggacgcgaggattccgtcacccgccttaccgtgcgttcaccggtacgcggcattgttaaaaatatccaggtcacgacgattggcggcgtgatcccgcctaacggcgagatgatggagatagtgccggtagacgatcgtctgctgattgaaacccgcctttcgccgcgtgatatcgcctttattcatcccggccaacgcgcattggttaaaattactgcttacgattacgccatttacggcgggcttgacggcgtggtggagaccatttcaccggataccattcaggataaagtgaaaccggaaattttctactatcgcgtatttatccgcacccaccaggactatctacaaaataaatcaggacgccgtttttcgattgttccaggcatgatcgccacggtagatatcaaaaccggtgaaaaaaccattgtcgactatttaatcaaaccgtttaatcgcgcgaaagaagcgctgcgcgagcggtaaatcgttgaagataagaagatacgggggctggtcacgcgtgtcacaagtctgttatacttaccttacacattggggctgattctggattcgacgggatttgcgaaacccaaggtgcatgccgaggggcggttggcctcgtaaaaagccgcaaaaaaatagtcgcaaacgacgaaacctacgctttagcagcttaataacctgcttagagccctctctccctagcctccgctcttaggacggggatcaagagaggtcaaacccaaaagagatcgcgcggatgccctgcctggggttgaagcgttaaaacgaatcaggctagtctggtagtggcgtgtccgtccgcaggtgccaggcgaatgtaaagactgactaagcatgtagtaccgaggatgtaggaatttcggacgcgggttcaactcccgccagctccaccaaacattcattcatgatgcatcatgaaccttaaaaaagcctgtaacttcaatgagttgcaggcttttttgttgcatgtgtggtcatgatctctgtatgaatcttgagcttttggcaccatgtttagcaccacggtatcgtggggctaaaaaagcgtggtgctaaaacatgcctaaccaactgaaacccttaacaaatgtggagatcgctggcgcgaagccccgtagcacagactatgagctacgggacggtgaaggcctgtacttgctggttaagacttcagggaggaaggcctggcatttcgagtattatcatcccgtcaccaaaaagcgcaccaaaaccagccttggcccttacccggtcgttacactggccatggctcgcgaaactcgcacgaaatacagacgactgctctatcagggcatcgatccccgtcaacacttagcaggaatagctgaagaaaaacgcatccagaatgaatgcacgctggaaaaagttgcggaacagtggctcaaagagaagaaacggaccagcgatcttagcgaagatcacgccaaagatgtctggcgctcgctggagatgcacgtcttcccctctctgggtaacacacccgttaccgagatccgcccgaagatgctcaaggaacacctcaccccgctggaagaacagggcatcctcgaaacgctgcggcgagtcatctcacggcttaatgaaatcttccgttttgccatctccgaagagctcatcgaattcaatccggctgacaacctggtcgcccgcttcaagaaaccaaaaaagcagaacatgcccgcccttcaccccagtgaactgggcaggctaatgctggcgctacagaacgcttctatccgcaaggaaacccgctgccttatcgaatgggagctactgacctgggttcgccccggcgaggccgtcagcgcccgctggtgcgacatcgacatgaaaaaagcagaatggcgcatccccgatacctttatgaagatgaaccgttcgcacacggtgccgcttagcaaacaggcgctgcgcgttcttcagatcatggagcccgtcagccgccatcgtccgtgggtcttccccagcatccgcaaaccactggagcatatgcaccagcagaccgcgaacgccgcgcttatccgcatggggttcggcggcgaactggtcgcccacggcatgcgcagccgccaggaccgcaggcgcaggtcattttccccgtgaagtcctggaatctgtgctggcacaccagaaagaagacgagatcgaagcggcctacaaccgcagcgactatctggaacaaaggcgaccgctgatgcagtggtggggaaactacgttgatgccgccagacggcaggcgctgctcggtgcagaagaaccgctgcaaatcgtggaaggagaataatgtgaccagtcccattcgtcagaatctgtttgaacgggaatgtgatatgccgcttctggaagcgcggcatctcgcccttctgcttctaggcctcgatgcttcccaacctgcaaacgccctgccggaagaacatcaggaaaactaccgtatcctgcacgacgccatcagccggaccattaaggcaacaggcatggtcagtgccccggcgaacaagcgcatgttctatgccgatgagatgtttgccctggcctggcggcttattgatgacgaactgacgccgtcagaagtaaaagaccgtagcctgaaggcggtgatgaaactgtcgcgtaatagccgtggccgcaagtggctgaagacgctcggcgacgacgcactaccggatctcacggcttcaacacaaccttccctgcgtggaatgcataagcgcgacaaagcacgggagaatactgcccgactctgctggctgctggttcagcttctggttgaggagactgatgggcgttatgggacgtcggataaaccggcttctgaccagatacttcgaaagctgaagacgctggctaaggaacaggaattgccgtcggatgggcttggacgggggacattttatgaggtgttgaagatggaaagagaaaagtgagtataggtaattgatatctgtgtaagatgcagcgaaccgaataaaatctgaaagctcagacgtatagtctgcttcgtcctgtgagttcaataggttgatgcaacgctatccttaatcaagggggacgttgcttgtgtaacatttaatctacggatattggtcattaatgcgggttgatgttgtactgtcatgattgagcgacctcaggttgagggtggggctcacttatatacgtgtatccattattagtaggtaaattcatgtatattggctacctaatttagccactcctccgcacatagttaactcctgatttgagatagagagggattatgatgctaggaagatttattgcttagcatatagcaggtgatcttttacctactggagtggtaaattacccctatttttcagtgaatgttttgtcagggagtattaatttcgtggaaaacgataaggtgaagttaggaagaaatgataaatgctggtgcaaatcaggacttaagtataaaaaatgccatctcgatcgagaccgtgaaatgccggtatctaaagccgaagccctgaaattttcaaagtctaattcgcagagaaaggcgtgttatgcaccagcatccatgcacgaagattgtgacaaacgtatcgttcaggcgcacacgctttctaagagcagtagccttaaggcgatcgccgactctagtaatcatgttatgggagtggtaatgaacctgccgagcctgataaaaaacaacggaagatgggttccagagaagattggtatcaatcaggcatccacttttaccggattttgtgcagttcatgacagaatattattttcatgtctagagaacgaaaaatttacaggcacggatgagcagtgttttgccctaatgtttcgttcgttatctaaagaaatttacgccaaggaggggggaagacggtcttccgattttgctaaaaatgccgataaaggaaagttacaggccgaacaagtctatattcaggaatttgtcagcctgcatcaaagcggtttgaatgcagcaataactgaactaaataatcttaaaactagcctcgaccgcattctgcttaacagacagttttcagaaattgaaagtgttgtcttcacgttttcagaaccattacccattgcggtttcgtcaattctttcaccggagagggattttgatgggaccaaaattcaggatttgaacgatcttaccgtgtcggcggaacaggtctgcttcaatgctttttccagcgaaggtaagggatatgtagtgttcagttggctgggaacttcagcaattatcagacgttttgtgcgatcactaattaaggttcaaactgacaggattttcaacaccctcctgtattttttcttcacaaaagctgaaaatacatactcatctcctgagtggtgggacagcctcagtgacaaacagcgagagaatatcggcaatatgattatgtcgggtgttgacttttttgataattctacattacgcgtcgatcattcagttgattataactctgctgcgcttgcagagataagatacagcaacagcgagatttccagttgaatgctttaatgccattagaaaaaacgggccaatcagttgtaccgaaattgtaacgataagatgtcaccgccttttgctgccagatcggcatctttcgacaaactgatgtaggctgctgatttccgcttaagcggaggttatcaggttagggatgctatctgcagataggctatagtaactgggtactctccccaattgtaattgacctgctctccgttaatgaacaggtcacaatcgttgtaatgcggccattaggagtttccatcgtagtattttatccagtcacaatcggagtaaaaaataaacatatattctatcaattcactcattaaatttaatctagcctacatacaccagctggttttattttttcagtaatgaaaattaacatatcgatttcattcttcttagggactaacatcgaaaccccatgtacaagactatttctaacctcagtaatttttttaataaaagttgcatcttgcctagaaattattttgttttttactaaagcattgactactttccctataaaaagagggcgattaggttgtttagccgaaaaaaccttatgccttgcaattttttcaaaattaatccaagcagagatgaaacaagtaaagccagatacaaacatatattcttcatgatcaatgtctggcaggtgcccaacaactgaacgaatcatgtcatctggtaagttgaaaagttcacgttcaagatctttcgctacaataactccagtatcaattaagttaaaatcactttgcaaaacaattaattccttgtgcaactgcggtaaggaacccttatatttatcatttaagacaaagtaatattttttaataggacatatatcatgccagtaatcccttaacccttcaaaatcatcttttattttattaacagcagctagtacattattagatgcatcttctggtgcatacacctgataatataccccctgccccttaataaaaccatcattctttctgtctccaatatttccataaggcttcacctgctgaaaatctggcgacttatagtacattatttttgaaaacaagtcctcaaagcgaactccgtcagactcatagacttggagatgaaacatgtttctagcaatagataatgagatatcatccatagtcaaaccttgcataattagagtaaattcaacaacatttacttatctaagttatatgaaacttggcgttaccacaataacagaaaatattaaattgttagttcttctgactgcccctgttgattaacacaccgcaacttaagtaatgccatcatcagtggttagaacagttaacagcttcctcgcttacaactgacgatgagatagcggcagctattgtgaagtgtttgtagtcgtgcgttgccattcgttaaccatagcaaatattatctcgacggagctcaactggataaaaaccatttattttcaataaattaatctaacaccatcagttttgatggcaaagaaaatcttcccggactctttactttctatccggacttaactttttcacccggacctatacctcccctccccgttccgcgctataaccgcctcgacactctgttcccgtgaggtgcaatcatgaaaatccgtgctgacagtaacgatgcttttcccgaaagcggcaacgtgcgtatgcggcaggtggtccagtttctggcgatgagtgaatcatcggtttaccgcctgattaaagacaccgactttccccgccccgtccacctctcttcccgactggtggtcttcgatgctgcggaaatccgtcagtggcaacagcgccgcaccgtcatccgttaatccacgctcagggatgagccgactgataccccatcatgaaacgcgcgccctttctctgtaagcagtctccggaccgcacgctcgaagtggtgatccttgccggaagcctggcatgggaaacctcacgcgtgtggcgaaaagatcccgaccgggaagatgatgttcctccgatggtactcggcccgaatgaactggccgatctgagcaatctgaccattatcaggcccgacacgctctacgtccgggtacttcgcaccggcgatatcagtgaagaagatctgctgaaaattgccgtaaaactggcgcacgcgggtgtgcagatggcccggctgatgagccctgacggtgagttactggagaactggaccgggcagcttgaacgcctgcgacaggaaaggccttccgatatcctgccggatcacttccgcctcgatgaagaggcgctgtggtttgacaagctcaccgaacggcgcgacggcgaaagcgacgtccagccccagcgcatctgttcccctctgcgcgtcaccgccatcacctgcgacagccatgacggcagctatggccgactgctggaatggcacaccaccaccgggcagttgcggcgctgggccatgccgatggcgatgctcagcggcaacggcgaggagctgcggcgcatcctgctggagaacggtctgaccaatatctccacccgccccgccctgcgcagcctgctgtgcgaatacatctcacggtcactccccggacgccgggtcacctgcgtggagaaaaccggctggcacaacggggtatacgtgctcccggatgaagttatcggtcccgatggcgacaatgtcatccttcagggcagccactacctgactggtggctttgcgcaggcagggacgctggcagagtggcaggagcaggtcgccgcactctgtgcaggcaactcgcgtctggtctttgccgtctgctgtgcgctggccgccccgctgttgcgcctgaccggaacgggtggcgggggtttccacctgcgcggtgagtccaccgatggcaagaccacggtgatgaaagtggccgcttccgtctgcggtggcacggattactggcactcctggcgggccaccgggaatgcgctggagggaattgccagtcgccacaatgatgccctgctgccgctcgatgaactgcgcgaagtggatccgcgtgaagccgggatgattgcctatatgctggcaaacggccagggcaaggggcgcgcccgcaccgacggcgaggtacgcaaccgcaggcactggacgctgctgctgttctccaccggggagctgtcgctggcggaacacaccgaacgcgccggggagcgtatctacgccgggatggacgtgcgcatggtacaaatccccagcgacaccgggcagcatggcgcgtttgagcaactacacggctttgccagcggccagcagttcgccgataccctctgcgacagggtggcccgctttcacggcaccgcctttcgtgcctggctggccttcctcacccacgaccaagacgccagcaccacgctagcgagagagttacttcgccgctaccagaacgccctgatgccggacaacgctggaaaccaggtgcagcgcatcgtggcccgttttgccctgctggcggcggccggagagatagcgacgctgcacggcatcacgggctggcagaaaggcacggcgtatgaggcggtgcagatctgcctgcacgcctggctgaacgagcgcggccatattgccaaccaggaagatgaaggcgtgctggcgcagatcaaacggtttatcaccgcgcaccagtacagccgctttgcctcgtgggatggcccggaccgcccgctgaatatggcaggctttcgccgggtggaaaaagatccgctgacgggcgaggaacacacactgttcttcatcctgccggagggctggcgggaaatatgccggggattcagtcccgccagggcggccagattatgccaggaagcagaatgcctgcagcccggcagcgacgggaaataccagtcgcaggttcgcctgccggagatcggcaaaaccagggtttaccggcttacctcccgcatcctcagtatctgagtgcagtctaacgtgtcttaaaaaaaggtggtacagggtgggacaagtggtacacgcagagctggcgagggttacagcgtcccaccttagagaatttgattaaaaaaaagtggtacagggtgggacagccgttgctaaatctgtcccacttttccgactggcatttttcaggtggtacagcgcaaagccacggctggcgcggttgtaccacttgtcccacctgtaccacctcaaaaacagaatgaatgaaaatggcgaaaagggagtgaaaaggcaaaggctgaaaggaagggagaagaaggggaacggacttgcccgaaaaattccgaaacataaacaacatacgaagttgaagcaataacaacaacgtacatttcaagcgcttagaagcgagatttcacgttacagtaacaatttaatatattgatatcattaactattccccttatcttatattcataatataatcattgctaacattaataaaaagtcgagaactgcaatggaactcagaagaatatctgtaaataatttgttcggaattttaaactatgatattgatttagggaactcagaaacaattattattaccggaccaaatggttacggaaaaaccatgcttttaaagataattgacaacattttaaataaaaatatagattttttctttgatttgcgatttgaagaaataaaatttgaacttgacaccatattactatgtatagagaaacaaaaaaataagaatgttgcagttacggtagtcgattatgtaaacgataaaaaacgacaggaagtattcactctaaataaaaacaaagaacttgacgtcgattattttgatgaaatatataataaactattaatctgtgacaacatagattctgatcctatactaaaatcttacaatcatgaggaaatattaaattactataaaattaaaaaaataaaacttcataaagaaaagcatcataaaagtgatttcttggataaatccattcctaatgcagagttaacttttatcaaagcgcaaaggatagagaatataaaaaatgaaaaatcagcaatcgagtcacaagcaaatttccttcttgagttgataaaaagagctgctgaggaatcagcacaaataagccaaagacttgactccacatttccagcaagattatttgatagcattaacgaaaatatatcttcaacttctatcaatgacagattgataggcattcagagaaaaagagaactttttatgaagttcgggataataaagtctgaagatacttttatccctagaaaattcagcaatgcaacattaggaaaagagtactcaaccgttttaaatctgtatatttcagatgctttagaaaaactatcaccttatgaagaattatttgaaaaaataaatttatttgttaatttattgaacgaaaaaatgcttgcatttaaagaaatcaagatcagtaacgagcatggattttattttcaaagtgataatggagaaagaatatcattaagtaacttatcttcaggtgagcaaaaccaaatagtcatctattttgatcttatattcaaagctaaacaaaattcagtaattcttattgatgaaccagaaatctctttacatgttgcttggcaaaaagaatttcttgattcaatagcaagaatacaaaaacttaatgagttctctaaaataattattgctacacactcgcctcaaatagttaataataattgggatataacttacgatttattcgagaataacaataaaaacatggagggacaatgaacagcctccgtgatatcaccggtgtttcagactggatatctggaatgcttttgctttttagatcaccaaaatatagcaggaagatttttttcactctagaaggagaaagtgatattagatttcttaatactcattttgcagatgagagaatccattatgattcgccgtgtagtggtaaaccagaagtaataaatgctgtgcaattattgcgctctcatggaaaacaaaacgtatatggtttatgcgatgctgactttgatattttagaaggtaacagctacgaaaacattcattttacggactgtcacgatctcgaaatgatgttaatagaaggtggttcatttgacaaatttatttctgagttcttaaagacaagtatacttagaatacatactcttgaagatatacgaaataatcttaaagaatctataattgacgtgacttacaaaataggaatactaaaatggcttaatttcaaaaataatttattgttaatgtttaaaggaatgaaatacgataacttcataacctttgtggactttagtgcgaatatagacatagataattacattcagcacatcctcgacagaagtcctcgaaaacctccacactgtgatttcaattttttgaaaaaagagtaccaattactttataacaaacaagcagattataaatatgtttgcaatggacatgactttacgtatatcaccatgatggcctttcactcagaattttcccgtgataagaatataactcaagaaaaagttgaatcacatttaagaatagcatactcagcaactgcatttcaaagaacaaatatttataacgaactttcgggcttaatagatagccataatatttaataaattacattcaaaaaaaaatagcgaaatacaccgtttcaataccgaaatggtgtatttttcagaaaaaaaaccaccttcattaaaattaaatataacccattgttttattaaataaaaacacgagtggatgaacaatcaatgcaaataacctcatatattaccagacaatatcaatgtacttccggggttatttttcttaaaacggtgatactggaggatcaattctgcaagctcatcgtcaacagcataaaaatacgcttccggtacatcaagcgctgctgccagcttacagacgagtttgaaatcgggtgcatggacttccttttcatacgaactgatacgcgcgcttgcggattcttcatccagcccagcgagtgcacccagttccgcttgcgtcagatcagccctgactcttgaaatctttaatcttttaccaatcacgattgcaatcctgcacctgaacatgcaggaattatccctctctgggcagcaaccatcttcaggcattcccttacctattcatgtattacttgaattttgattacatttagagcaatattcaagaattgcgtgatttatcacggttaaaaagagaaaaccgatgaaaaagtcaacaaccaaagactggcaccccgccgacatcgttgccgccttacacaagcgcggtaccagtctggcgaagctgtcgcgggaagcgggactggcctcgtcaacattgtcgaataccctgacgcgcccgtggccgaaaggcgagtggctgattgccatcgcgctcgacatgcatccatcagaaatctggcccggccgttacctcaattccagtaacaaacgtgaaccccgaaaaccgcttcacccgatgacaacaaccgacaactccgggacataacgacccgcgctgtgagtggcaggacgcattaaccaacgacacctgacaggagagttgtttatgcacaccgaaccacaaccatgcaccatcgcaccactcgcaggaggccgccatgtttctggtctccctggctgaaggctttatccacctgttccaggccgcaggcaaaatctttctcgacatgatgaccgggcttatcccgatgctcatctgcctgctgctggccatcaatttcctgatgaagctggtcggtaccgtcagaatggagaaggtcgctgccctgctcggccgctcgcgcattctcacctacggcgtgttgccggtgctcggctggttctttatgagcagccccggcgcgctgacgctcggtaagctcttacctgagaagagtaaacccggctatgaagatgcgctcggcaccaccgcccatcccctcaccagcctgtttccccacgtagtgccatcagagctgtttgtctggctcggcgtggctgcgggggttaaggcactcggtctgcccgttacttcactggcgctgcgctatatcgccgccgccatgctaattggcctgatacgcgggattatcaccgagtacctgttcctgcggctcagcaggcgggggaatgcgccatgatgatttactgcgcacgtattactgccatcgggctgtttgtcgccgacggcctcaccgacaagatgctcatcaccttcgacagcaacgggccgaaggactgtctcgattactcgctgtcgctggagccgtcgttccgggaagagagcctgatgatactccccggcgaccgcctgctgctggcagggcatgattatctggtgactgccgtcggcaagggggtacagcaggcgctgtttgaactcggtcatctgacgctggtgtttgacggtgacctgaagccctgccacaccggggcgattcatctctccggcccggtgccgaaactccatgacctgcacggcaatctggtgattgaggagggacggccatgaacacggtacttattcctcccggtcccggcggctacggtaaagggctttggctgcccgttgccagcggcaaaaaggtgctgtcactgaccgggcgcgagattcatccggtggcgatagaaatcggtgcgctcactgaatcggaagtggtgaacggcttctccgatatcccgcctgataacgacatcctgtgcgtggtgattaactgcgccgggtccctgcgctgcggcctgtatccgcagaagggcatcccgaccatcaatgtgctgcccacctggcgcgcggggccgctggcgcagtttattagcgaggataactacgtctccggcgtgacgatagagcaactggttctggtggatacggccgaagcgccggacggtgaaccggagccagtgtctgtcacggcaccacggattatcaccactccgccgcctgcacgtggcgcggaaaaactggttcgcatggtcgagcgtaccggcaccgccgtcggacacgttatcgccctgctgtttgccgccagccgtgaggcggtggacgtgtcgctgcgcaacgttatcccgtttatggcctttgtctcactgctgattgccctggtgcaggaaaccgcactcggcagcctgattgcccacgccctgacgccgctggcgaactcgctgtggggactggtgctgctgtcgctcatctgcggcattccgtttctctccccggtgctcgggccgggggcagccatctcgcaggtcatcggcgtgatgattggcacccagattggcgcgggcgcgatatccccggccttcgccctgcccgcgctgttcgccatcaacgtgcaggtcggctgcgacttcgtgccggtaggtctttcgatgcaggaggcgaagccggagaccatcgcgaagggcgtccctgcctttctgctctcacgtcagttaacggggccgctggcggtcatcatcggctggctgttttccctgggcttattctgaggacatcatcatgaacaaaatcagagccgccgtggtgggtgcaggtatctacggcaaacaccatatgaacgcgtaccgccataacccggacaccgtgctggttgccatctgcgacaccgatacagaacgttgtgacgaccttgccatggcgtacgggatccagggctacacacgactggatcggttactacagcaggaggctattgatatcgtctcggtggcgacaccggatccgtaccataccgaatccatcctcaccgccctgcgccacggtcagcatgtactggcggaaaaaccgctcgccacctcagtacgcgagtgtgagcttatcgtggagatggcgcagcagcgggacctgctggtcggcgtcgatttccacaaacgctgggacccggcagtaatgcgcattaaagccgaactggaaaatccggagaccggatgcatcctgcgcggccatatcagcatggacgacgtgataacggtcccgacgcagtggctgaactgggcgggcgcaagctccccggtgtggtttctcggttcccactgctttgacctggtgcgccacctctccgggcaggaggtggtatcggtgtacgccgtcggacagaagcggctgatggtcgaatgcggcctcgacaccttcgacagcgtgcagagcctgctgacaatggccgacggcagttcgtggggggtggaaaactcatgggtgctgccggagggctttccgaaggacaacgacgggcgcatcgacattctctgcgaggcaacctatatccgcagtacttcccaacatcgcgggctggaaatcaccacgccggccttgacgctcacgcccaacagctatttcatcaactaccgcaacggcgttgccagcggctttggtatcgacccgatcaatgattttgtgcgggcggtcagacataaagccccctacccggtcaccgccgaagacgggctggcggtgagcaggatctgcgaggcggtacaccgcagccttgagagcgggaaacctgaagatgtttaaacaaacggcgcagggtagctccctgtgccagttccatatgattttgctaattctacttactggtctattcactcgtcaggctttggcccgcagatatattaatgttttccatcctgccgcaacaaaaccccacacacgattgtacgttttttagtcattaaggtgaatagcggtattttatggctatgacctttttcaccttcctgccaatagtatcatgctaaacctctcatttatgtttattgcgccaataatagtcaacaagtatttcaaaaaagtcccaagcaaattataatgctggagtttcataatgtccctttaaaaaccattttaagaagagctattatgtccctccctacaaattttaatgatattcttcgtttttttgaaaaagattacgatacagccaaagaagataatgctttaagtgcacgcggccaatttctgcaactttacccccttaatcacctaaaaaaaatgacgcttgatgactatgtcatcggcaaaggtacagcttcattttgtgcttgtgttgaagtaaaaaccagaacatgggcaaatatgcaaggtgcgacggcgctcaaatttggtatttattatggaaaatcaaaatcagatccaaccgtccgctatcgttttactcagaaatttggcgatgatgatattactaataaagaagttttcgctaatgttaaagacgctttactagacctaatacagtcagggaaagaattagattttagagcgattgacgagaaccccctatcccaaatgtttaaggctaaaatattgagcctttactttccagaacactttataaacatttgcagcaaagatcatcttaaagaaattgctatggaaatgggtataaaagagcaacagtttattagtaaatatcaacatttgttattcaagaaaaaactagagcataaaatcacccgaaactggagcaatccaaaatatatgtccttcctttatgcccagttcatacgtaaggatcttagcagcgctcctgctgtgatagttaaaaaaccacaaaaaagaaaccatcccgaagtcaatttcgaagaaataacggacaatcgtgatttaataggcaaaaaaagcgaagaatatgcattaaactgggaaaaaaaccgcctaatcggtctcggctattcaaaactagctgaggaaatagatgatcgccgtaatcgtccaacttatggttacgactttctttcttttaatgccccaggtgatgagcgatacatcgaagttaaatcaattggccgggatggaaaagagggagcattccgttttttcctctcaggaaatgaactcaccgtttctaatttaagtaaccacagtaaaaactattatttttatcttgtacagtatgggaaagatggagagccatgcaatctatatgtaaaacatgctcaagatctttacactaatagtgaaatgtccccttgtgcttacgttgttaggttcgatctggaagaacctgcttaatagtttcgacaacctccggctcataactttaaaagtgtgaaatcaggcgcagagttccccctgcgccttcacctcagtgatgctgtaacaacacctgtgaaatcttcctcgcttcacctgccggatccgccgcatgcgtgatcgctgatcccacaatcactacatccgggcctaacagtgcgtagtccttcacagtctggctactgataccgcctgccacggcaatccgggctttccggcgcaccttcaacatcgttatcaaatcatcaatcggtttgcgccctgctgcctgctggtcggtgcctgtgtgtaccgccagcatatctgcccccgcctcctccagcaggcggactcgtgcggggagatcgtcgacgcagatcatatccaccaccacctgctttccggcctcttttgccgcgcggatgcacgactggatcgtcagcacgtcggtcacacctaacaccgtgacatagtctgccccggcgtcgaaaagcagctgcgattcaaaatggccgccatccataattttcgcatccgccagtacttccttatgcgggtatttttctttaatggctttaatcgcgttcacgccttcccgaataagaaagggtgttcccacttcaataatatcaacgtcatcaaccaccttatccataaataccatcgcttcaggcagggttaactcgtccagggcaagctgtaatttcatgttggtttccttgtgtcgaatgactattcgaggttggcgtgcagcgcaaagcctttggttaagcgatatcccgtcgactgcgccagattcacaatcatggcgtcacccagcaccatgaccgcctcttcaaacaggctgccgccgggcagaatacctttcacattctcgggtccatccggcagtttgtcggaataagccgggatcctgaccgccacccccgccagtttccccagcgtggactcggggaaaatggtcagcaaggccacagtgccacccagttgcttcgctttcgttgccacattcaccagcgaagccgtttcacccgatgcactcgccagtaacagcaggtcgcctttttgcagcgcaggcgtgaccacatcgccgacaacatgcaccttcaggccgatatgcatcaggcgcatcgcaaaagctttcagcatcaacagcgaacgccctgcgccaaaaacaaataccgctttcgcgtcagcaatggcctgctccagacgcgccagcgcagcgccatcaatccgcgacatcgcctgattcaggtcgctacaggcaacgcctgcaacagattgcgtttccatcatgcgtcctcctgacagagcgggaataaatcatcctcatactggagcatccccatgatttcccggacatagttatcgacatgccccagaaaatgaaaacgttccggtgcggcgcggtagcgctggtaaagcggcatatcgaaggtgatgccaagatgcgggttctctttgacggtggcgaatttgatgcgcggaacacgcgggtagtagtgattcttgcgcacgcagagctgcccgttctcctccacgatgtagcaggccataccgtggtaaaactgcaccgtgtcgtagtgaaccgtacagggtttatacgccagattgctgaacaccagcggcccgtcgccgatattgatggagcagtggccataattcggcggcacgataatgctctgcccctccttcacgacggccacgataagatcgtctaccaccagctcctgcggcgcggcggcaaaatccggcgacttttgcaggatatacgccgccgtacccttaattacttcatacacctccggatgggtgttgcgccgcgtgtcgttatagccgtgataatggccactggttttcttacgctccttgccaatcgtccccggcatgatgatggtgatgtcgtactgatactggtcagcagcaagccgttcctgatcctccgcaaagctgagaccgcgataaacatcgtaagccggttcattacgcagcccttcggtgaactccggtaaaaccaccgccatctgcccggcgcttttgcggccaaagccgagatagtttagcggcggtttcagcgccattacgccatcatcatcgagatacagcggcaggccgctgtggtgtagctgtttcatttttgccccctgtatacacgtcatacttcaagttgctgctacgttggctgcgcgccttcatcccggtcacatagttatctatgctcccgggaactcacgcgcttgccgccttgctacaactcgaattatttagtgtatgggttcacaatgtccggaaaccggatgcgctttaatcgcgcggatcgcctctttcagccggtcggatttcatgccaaagacgctctgaatgttgttcccgacctcaacgacgcccgccgcgccaagctgtttcagcagcgctttgtccaccagcgtcttatccgtcacgtcaatgcgcagacgtgacatgcaggcttcgatgctggtcatattccccaatccgccataggccagaatgatgccgctcaccaggtcgttctgttcgctttcctgcgccacagcggtttcttcgacttcacggcccggcgtcagcaaattccagcgacggatggcaaaggtaaacaggacgtagtacaccgcgcccatcaccagcccgaccgggaataccatgtaccagtgaggcgctcgcggcagaacgccaaagaagagatagtcgataagcccgccggagaaagagagcccgatgtgcacgctgaaccactccatcagcaggaacaccagccccgccaggacggcgtgaatgccatacagcacgggtgcaacaaacaggaaggagaactcaatcggctcggtgataccgcagacgatggaagtgatcgcgccagagagcataatgcccttcacacgcgctatgttttccgggctggcgcagcggtagatcgccagcgcaatcgccggaatacagaacatcttgatcggcgtcagcccggccataaaggttccggcggtaatcggcacctgatctttcaactgggcaaagaagataagctggtcgccatgcaccacctgcccggctttgttcacgtactcgccaaactgcagccagaacgtcggccaccagacatggttaagaccaaacgggatcagcagccgctcgacaaaaccgaacaggaaggcggacacgcccggcccctgcaccgtcatggtattcgacaggccattaatcagatgctgaaccggcggccagaccaccgccatcaccagcccgacaaacagcgcggcgaaggaggtcactatcggcacaaatcgcttgccggagaagaactccagccatgaaggaagctagatgcggtaatagcgtttatacagccaggcggcgataatcccgataatgatgccgccaaacacgccggtctgcagcgaagggatgcccagcaccatcgtgtagtcacgcacctgcgccaccgattcgggcgtgatccccagaaactggccgatggtgacgttcataatcaaaaacccggcgatcgccgacagcccggcaatgccctgatcgtcactaagtcccaccgccacgccgaccgcaaacagcagcggcaggttggcgaaaatcgcactgcccgcttccgccatcagcttcagcacgtgaaccagcccgtcagtgccgagaaacggcaggctggcgacaatattgggatcctgaaagctaacaccaaaagccagcaaaataccggcggcaggcagcatggcaatggggatcattaacgatcgcccgatgctttgtaacatttgcagaaggttgaatcttttcatctcgatctcctgagcgcgtctttatgacagggattcgcacaacagcaggttctgctccgaacaccttcagtatccgaacccgaaatgattaaaaaaacagcaaccaaagacgaaagttatttccggttttcgcttaaaaccggaaaatttatgagggcaatcacgccagataccgtcagaaagggataaaagaggaaatcgcgttcggcgggaggccatcatatgagtatcttcgaggcgcattttcgcaggctgcacgcccgctacggcgcaggtcagacgcacgaattacagatgcaggagatcgccgccatcttcggctgttcggtgcgtaattgtcgtattgcgctaaaaaagatgcatcaggaaaaatggctcgactggcagccccagcgcgggcgcggcaagcgctcacggctccatctgttaacctcgccggaaaagctgttcagccagaacgtcaataagctgctggagaagcaggattacggcaacgtgctgcggtttatcggcaacgacaagtatctgctggatcgcctgagcctgtggcgctttggggtacaggataaaagcagcgaaacgcgggtacgcatcccctactatcgcaatctggatccgcttaacccactcgtccccctgcggcggaccgaacgccaccttctgcgccagtgcctgagcggactgacgcgctatgacgccgttcagggcaggatcgtccccgatatcgcccactactggacccataacgaggactttacccgctgggagttctggctaaaatccaccgcccgctttgccgatggctgtgagctggatgccagcgccgttcagcgctgcctgctcgccgccagccagagcccgcagttcgcgccgattttcagcccaatcaaaaccattaccgctgacgccccctggcatctggtaattgaaacgcatcatccggtcagacggctcgactgcctgctcgccacccagccgacgatgctgtttgattaccagcacggacacatccgctgtaccggcgctttccacctgcaggagcacagcgacaattttatggttttgcggcgcaatcaacactggcatcaggcgcgccccggactggatgagatcaccattttcacctgggctccggagcatatcagcatgagctttattcccctgctgcggggcgaagaggtgcaggatgaccgcccgctcaacgagcgtagtctggagcagagctgctgctttgtgctgctcgacggtgacggtgcctttgcagatgaggccggaagacggtttatcaattacctgctgcaacctgtcgaactcctcagccagacgcagcttcccgacgaatacgcacgcatcctctctgtggctcagggtatgctgccgcagtggaatcaccgcccggtagattttggcgggatcacagcgccgtttaacctgcgtcagccggttattatcagcacctttcagcaaccggaactggtggagcttgccggagcaattcgccgcctgcttgaacgctggcatattcgcgccgaaatacggatcgacgcatttgaccactttaacaaccagctgcgccctcccgcggatatctggctcagcaactttatgctcgataccctttcggttccggcatttctggaatggctagcttccaccgcgctgtttacacgactgcctgaatcccagcgacaaaacctgaacgcgctgttaccgacgattctaaacagcgacgatgaacaggcgttcgctaccattgccgcctttttccatgagatgacccaccagcgatatgtcattcctttgctgcatcactggatggaatttgcgactgagaagtcatttacctggcgggatttaaatacgctgggatggccggatttcagccaactttggctcgaataatgctacgcccgcaaaagctcgctaaagggcctttaaaggcctttaagggtaagggagataagtgcgccattgtggctgtcaattcgttttgtttagctcttcctgattttcttcttgcctgggagaactggcatattttttcgtttctggatccagaggagctgcgtccggcatcagagtaacattccgcatggtgcgttagatcattctgcatacccaattctgttcgtttaagtattttaggtacggctgagatagcgtggtttgaaccatcagaacaattaaaatctacacccgcaaaggctcgctttagcgagcctttgcgggcggcatttctggataattatccatgaaagcctcaccagagatgtaaaagaatccttcctgccgcggcattctctggacaatattttcccaatcttctgatgctcatgaaaccgcatactgcatcatgataataaagttatttattatcaatgaattatgcggattaaatcagcttgaccatcgcatcaacaatgctatttttacggtaactgccgcagtcctgggactgcacccgagacagccacgaccttagaggactgtgcctggctgctatgtcaggttggtcaagcccttaaccccgcaagccggacaatacggcgggggcgtctctgacgcagtccggtcgttgttgctgctataacctgtgccagtaagaggcaggttggtaccgcctctttagacggagcgtatctctgcgccagtaaacaggttgcctgaaacggcggcgcgtcactttggaggcgaagcaaaacaaagtgacgccgacgcacaccgctgcgccagccgccgtcttatcaggcttatcgttgtattaaccctctgacgccatcatttctgcgtcaaaaagataacaaggaggaatgaacagtaccggaggcggaccacgacgatccgggggcatccctgctgaggcaggcggcctgcacaccgtgcagtaccgtaccccaccatacctcaactctcgccttccggcgcaccggtattgtttagcatggcgcagctttcgctctcccatgcattccccacgcgccggaaaatattgctaccgcatcaggcggaggagtcagcatgtcgcgactggcgcaggatatgaaaaaactggcgcaccgcgcaggtggcagccacaaaaccgtccacgaccgcgaacagatggcgcagcgttttgcccgtcatttgctggcgcagaatattcaggtcaccagcacctgccagctcaaagccagacacatcgcgggatatattcatgaatggctggcgcagggtatttctctgcgaacgctacagaatgagatggcaatggtgcgctctattctggctgaagccggacgcacacaactcagccagtcagaattaatcagcaaccagtcgctcggtatcagtggtgccagctgtgacgggacgcaccgggccattccggatgcactttaccatcaggtactggaccgggttcatcatatcgacgcaggcctcgcagccagcctgcaactggcgcgggtgatggggctgcgcggtcaggaagcagtacagtgctgccagtcgctgaaaacctgggataaacagctggaaaaaggggctgaacgtctgccggtgatcttcggcaccaaaggcgggcgaccacgcatgacacaggtgacggaccgggaagcggttcgtcaggcagtgaaagaggcgcttgggattgccggggagcgtaacgggcatctcattgacaagccggatctgaaatctgcaatggactactggcacaaccatctccgcgataccgggctgacgggggaatactctccccactccctgcgctatgcctgggcgcaggatgcgatccgctattacgaagagcagggtctgagccataaagaggcgctggcggtaacttcaacggatctgggccatggtgatgggcggggaatatatattgagcaggtatacgggtatactgattgaatctcactaatacaagatgtttcattcctttttgtatgtaaaaattcataactactttaaaattttaaatgcacaataaaagtatagatagataatgtgtactgtttccatttcaccgcacttgagtttaaaataccaagattcatctaaaaccaagattgtgtcatgaaaatttcatatttaaaatcatctccgtcaatgattgaagttttaaaaaataactatgaagcatttataattcaaaactataaattcaatcacttaggtttatttcatgacgaagacagtatttatgctgtaatacagaattacaaagaatctaatactacgttagatgaaatacaagaactttacaactacagatttaaaaccgcaggtgttccgggaccaacgtttacagaagaagtaaaagacaactatataaaaatagatcttagaaatacatatgaaaaagtaagtttatttggccaaccatttaacgcattcgaatttaataataacatacgcatagccataccatctaaatttcatccttttcatgttgacatgaagtggtccgacaacagttttacatttaccttcaataaagaacttactcctaatgatattgatgaaatcattttaatatgtgaaagcttaggtttttatggttataaatacaatattaaaacagaccatgaactacctgattataatcatcaaataaagaaaagtaatacacaaggaaatcttacattagttgcgagtcaataccttaggaataatcaacctaaagaaatcttggagaaatatgaagaggatcaagacttttggacagaaaaaagagccaatattttttcagatgtcaatctaaccaaggatgaatgtcttattgattcattcagaaagagtcaaaacagatgctttgtcgatgccagtgtatttccacgaaataacataagagaatatatatcactgtatgacactgtaatcattgcaattccattagcagattcacccaatagtcagagtttttatgacatttttaaaataagcaagattgagctgttagagttagttcgacgtggacgtataaaattcgtcgcattccaaaatctccagcggtatgattcaaattttttggcggatgttctgtctgttgatccagaatgtgtattattttcaagaagattagccgccgcgacattattagcaattagagaaaaaacaggattatttggattcgcatttgatagcagcactcaatataacttattgaaagaatgctacaattcaaaagtcgatgcacttaaaatattagcagagtcgttatcggaaaatatagcattttttgagtatggcataaatcaaagaggtgcattgggtattagtcaattttgtggggcaagctttgcagcccaaatatataaatcacgcggtcgcgattatggtattgagctaatgacaagcgcaatgtcacttgagttctcactagggctaggggcacatcactttccctttgagcacacaggttattctgaggtaaatgcctgtaaaatccttaatggcatatataatggagttcagcaatcacaaaatgaacttcgagaaatggagatacagactttactatcaaatattttcactattaataacgacatgaatgttctcgagttagatgacatcttaagcaaatacagtcgacgtatgatcccacaaatattacaagagtatgcccatctgacacctgaagaattaagctttaagatatactctctaaataaagatattaaagcaattgaaaagaggaagcaaaacttgtctattttagacttgtcaggttttgccccagtagttgcaggggcagtaatggagtataagggactatcgggagcgggttatattgcgttgctaccatggattttcaaattattaaaagtcaccaccaataattcaaagatattcagcaatgaaatatttagtaatttagaagctttaactttaaatactccaagaaacacaatgttggtacataaaataagacaagacatgcctaaatagtacgttttaattcgatgcattatactatttgcacatcaaccaagcccatacgaatatatgggccataacgatgctttcacaggtatggccatttatttggcaaattttaaatcagatcgtttaatctttttttctagtatagcaactatttctcttaacttttttataagttcaataatcgccctacattgcatccatcacaaataaaatgaattgagaatgagttcattgaaaaaatctcatcaattcataatgtaatttagtgatcttttgaagaataaccctcgatctctataacaacttctaaagtatacccaccattctggcttgcaaaatcctctttggtaatagacacatagcgattatctttctttatcataactgggatcttactaaatagctcattaatattaaagtcatcatcccctaatgcttttgatattaattcttccgcaagcaatgaaatggtattttttgaacaatttgatatgggtgaattatttatattagctcttaacttgagtttcttagcagcatattcatctccatataaataatatgcaacactatcacgaaataaaccatcattaccaatctcaatcatatgactacatgatatccaagtatcaaaactgaaatgataatcattggtgtcaactccttttccaacaagaaaatctttggctaagaatggtgaccacccatatttattatctacttcgggtggattagattcgatttttttccgtaattttacgtcttttaaacttgccttaattccttctttcgtcttaatttcattaatatgtatgtttcttacccagcgattaagagcatcaagatctgttctaaagaagcaaatcgctaatttttttgcataattaaacagagcctcatcgtcaaaatatatttttaatcctaataacttagtttcataagcttgataaaggtaaagcatataaataaatggcataaacgaaaatgataataaaactggcgtcagaagttcagtaagattagcccaagaaaacgttaccgaaggcgacataattgaaacaaaaaatgaatgggcaaaataaaatataacgaaaacgcctagcactacctttatcgtcgctccgattttttctgtttcttttttcgtattagctacgacagccagcaaccctaaaaaaagcataatagggtatattataaactctatagcaaaggaaaaactttgtagttcaagaataaatgtaagtagagcacttaatccaatcgtttctttgatttgtgatttaaaataatacttactgctctttattttatgtgtttcaaagattgttacgaaagcatatgtaattacccataccaaagtggtcttaagattatctgtactccaaacaccaatttcataaaaaagcacaatacaaatagacgtccaaacaaccgcaaatcctaatactgtcaaaatttgtttatggaaaaatgttttgataagttgataaaaagaatctctaatatcctttttacaccaaagcagagcaatgattattaacatccatataacaaaagcatactctctactattaatgtccatttagtcaccattactcagttaaattcatttcaaagttacattttatcaagcctttatcattttaaactgaattacggtaggcgtaccaactttgtataagatagaatacaacaagcttcatgcttcttttttagatagtttgttgttcgtgcctatcgtacactttgcgactgttcgttttgcatctattccaagcatcaatcaatacaataaatttcagcaccataaagataataataaaaatcaacaagatacgaaaaccccttccatatcaacatcatcaccaccctttttgcgccttcccttccccgcaaaaaataaaaatctccaacaaactcaaccatctcccccaccaattacaaggacgccagccactttttagttgtttgaagttcaatgaagtctactaagcccgcacagcacaagctctgcgggcttttttacgtctattgtcgtccagtgagaattgctgagaactacgagttatggcaccctgaatgagacccactaagaagggtccaaaaatcgagggtcccaaatggcaaaaatcgctaagaagctcactgacactgaaatcaaaagcactaagccagccgataaagaaatcaacttgtttgacggtgatggtctgattctacgaatcgctcctttggcgaagggagggaagaaaaattggtatttcagatatgcagtgcctgtgaccaaaaagcgaactaaggtgagcttaggaacctatcctcatcttacacttgccaaggcacgagctttacgtgatgaatacttgtcgttgcttgcaaatggtatagacccactagttcataacacccagaaagccaatgccctaaaagatgcaacggaacatacatttcaagcagtagccaagaagtggcttgatgagaaagtcaaaacgtcaggcatctcccgggaccatgctaacgacatctggcgaagtcttgaacgaaatattttccccggtctgggtaatgtgccaatcaataagatccgtcccaagctcttaaaacagcatcttgatccaattgaacaacgaggagtactggaaactttgcgacggctcatttccaggttgaatgaaatcttccgttgggcggctacagaagagctgacccgcagataatctgggccaacgtttcagtaagcctaaaaagcagaatatgccagccctacccccctctgaactccctcgttttctggcagcactgaacaatgcatctgtccgtttagaaacaagactactgattgaatggcaatataaacagacccgttttagttccaggcattttttgagatcccggtcaaatgattgtgttgccgatattcctccggcgtcatattgttcagtgattcatgagggcgttcacagttatattctgacacccatctttccgtgatttcccgcacttcattcagcgttctgaacagataaaaatcgagtatttctgtacagtatgttcggttaaagcgctcaataaaagcgttctgcgtcggcttacccggctaaataaattccagttttactgcatgttgctctgcccattcagccagtgcaagtgagataaattccggaccattatccatgcgtagcatgaccggatagccgcgatttgccgcgatttgccgcgatcctgtcgagtacacggaccacgcgcaaggctggcagattcagatcgatttcaatcgacaatgcctcacggttaaagtcatcaacgacattgaacgtgcgaaaacgacggccacagaccagggcatcatgcataaaatcgacagaccagctctggttcagcgcttccggcgtggccagtggcgaggggttacgcaccggcagccgttgtttgcccttacggcgaaaatccagcttcagcagacaataaatacggtggatccttttgtgattccacatgtatccctgccgccgcagaacctgaaaaagcttcggaaaaccgtatcgtggataccgttcagctgccgcctgcaatgcggtaataacgggttcgtcacgtgtgttatccggacggtaatgataaaccgttctgctcaggttcaggctccggcaggcctgacggatactgagtccgaatgccgttatcagatgagtgaccagctcacgcttaaaggctggttttaaagctttttttcgataacgtctttcagcgcccggttctcaaggctcaggtcggcaaacatctgtttgaggcgtcggttctcgtcctcaagatcttttatctttttaatatcagaaggttccatgccgccgtatctggacttccagttatagtaggtggcttcagatataccggcctcccggcaggcatctttaacggttcgtccggcttcaaccgatttaattacggcaatgatctgatgctcggtaaaacgggctttacgcatagcgatctcctttgttggcagattgattatgccggaggatctctaaatgtgaatggcacgattatgcgggatacttacaatggggcgtggaaaagactcttaggtaattgttgtctgttgtaggacatagcggcaggttaagcagtgaaattaggaatagttagcttggagttagatgcagacgttcttcagatactatttcagattcagttcgtgcatgtctgcagtaacttctgcaatattaccagcagacagtgagcaaatgtgtgtctaggcatagaatccgcatctccccacgcctgcgggacagtatccagagcggactaagttacttagatatctggctggcaacggaaacggtgagaacaatataaaaatgcatttatcaaatttaaataaaatgattgcttattttcccattactaatgagcgcccaacagggcgcttgtgaatcaggtcagatatggccgatctttactgacatcaaacaagtccaagaaaaatgtatcgcctatccgaatattagaaccaatctttacattagtagagttgttgcagaagaaatcaaagtgatatcttggatgcactttacccctagcatttttaagatcatcgtcaaatctgaagtatccgtgatcaactaaaagcaatgaagaaattgcatcacaataatttattgcctgctgaatatctctatcaaagttatcacataattctacagcaatggcctcgtaagaaaaggagccattaccgcaagtagcaattacatttctgcatcgggaaataaattcagcattaacaggaagagcataagcatcataattaaagcagatattgctttcatactcgattacctgaaaaggtaagttcatagtaaaaaaaccatctgttttttttaccaatatacgcttatgtgtacctgtgcttattaataaatcgaaatcctttgtttctttattccaggactcatgacatgtgtttaatatctctgcggtaacaagcagattttctaggttagaaaatgcatcccttacagcacaaaacttgtcaagatattctgctggcacgttattgaaaaagtaaaggctcatagttttttgttcctttcatattctatttcaatcaagcctttaatgtattccccgtcagcatcatcatcttccgcaattatcctttcgactcgatcagttatttttgctattagtcgaggtgtagacttcttgtctgcgcaataacttttaaccatctgagaaattgaaaccgactcatctagaacaataaaatctttttgactttgtatttcttcatctgaaggaagccttacatccatgtagttgttttcattgagaaagttcagaccttcgagaattgtagggattgccggattttcattatcattatttaaaactaagtgactttctaaaaatgacctcgccatcatagtgtagagtgcatttcgaaaattagctctcttcaccagtttcatggcaaaacaaataacaaatggaaattcaagaccttttgcattatttatattagaaataaaaagtttaccatcttgctttgattttgtttcatgtgagatatttgaatcccacccaagctgttgttttacttttgattttagcgaatgaatgtactcataaatataaccaccggcgtcaagaaaaataacagcaatatctccttgctctaaagatggattgcgttccttaatatcgattataatatcaactattttatctggcccattatctgttccttctaacaaatgaacagcagtacttttatgatttttgggaatatcttcaaaacgcctcaaagggtctcttgataaatggactctatctcctacttttttatatttatacccacaagaatcccattcaggctcttttaaccaacgcagaacaggttcctcgtagagtcccattcctaaggcatgagaaaacatcaaattcttaggatctgtgcggtagcattttttaagaacgatatctgctcgattcacgttatcgctaatcggcatgaaaatattttggaaaacgtcacctgctacatataattttttagaagtaaccatttcacagagatcaatgaagctttgtgggaagtcttgactttcgtcgataaatacgtaatcaagtgcctttttatcagctctcccactattatttatatctgcaatggctttcttacatagggcatcaaaatcgccattaccaaatcccccaaatggaatttcgtaataatggcatatatatctgtacattccagaaaaaggttctttagtcaaaccccaagagttgaagcaaaaaagttttgtaccccattctatctgtttttcgactcgcataaaatcgaaaaactcagggattctggttctcattgtggaagcgagaattttattaaagcaagtaaatgcaattctagaatcagggttttttgaataaatctcttttaatttgtgtaaaagtaattcagttttacctgaaccagctaatccttgtattacactcttttttccaaagccactctggaagacaaactttgtttgatccgtatcaaataaaataattttggattttattgtatctaataaattatttgcttcaaggttaattcttgatgtgtcgttaatactaccaacaataagtgagataattaaatcaatcaccctactttctttagtttcgacttccagttttttgaaatcgatatcattacgagaaagcgattcaaataaaatttgccacgattttttcctgccgatcttatctcgatacttgaatttctccgctaaataagaaacatcttcgagaaaatcttcctgatactcctcaaaaagatcatcgtcatccccaaaatctataaaaaaaggttttataccagaagaaaatactgcaatcgctcggtcataatcatactttacatcctcattagatagaggtctgcaaagaatatatgtttgttttttatgctgctcagcatagctgtttattattacatcaacaccagcactttgagccagagctaatgcatcctgagagtaaaagcagtagttggacattaaacttcctctttagcgggttgtctactcatttcaaattcttagttgtgtgctgtgcgagctaatgactgtctttgttctgaatcatactctttacacagaaaaaaaacactttgcagcttcgttaaggtggctcgcgttccgataaactttagcctgctctgcaatgtcgtatcgtaagttattcgttgggatgagagggtaaacctacctgatcttacccagcaatagtggacacgcgactaagtgagtaaactctcaagtaagaggtgactcacatgacaaaaccagcattaaccaccaaaaagccacgcaagcagcacacgcctgaatttcgtcaggaagccctgaaactggctaagcgcattggtgttgccgctgcagcccgtgagctcagcctgtataaatcacagctccacaactggcgaagcaaacagcaaaatcagctctcttcttctgaacgcgagcaggagatgtccgctgagatcgcccgtctgaaacgtcaactggcagaacgggatgaggaactggccattctccagaaggccgcgacatacttcgcgaagcgcctgaaatgaagtatgtcttcatcgaaaaacatcaggctgagttcaatatcaaagccatgtgccgtgtatttcaggttgcccgtagcggctggtacgtctggcatcagcgtcgtcatcagataaaccggcgtcagcggttccgccttgtctgtgataacgtcgtccgggaagcattcagtgacgcaaaacaacgctatggtgcgccacgcctgacggatgagcttcgtgctcagggttaccagttcaacgtgaaaaccgtggcggccagcctgcgtcggcaggggctgcgggcgaaagcctcgcgccggttccgtccggtcagttaccgcaaacatggtctgccagtctcagagaatctgctgaagcaggacttttacgccagcggcccgaatcagaagtgggtgggtgacatcacgtatcttcgcactggtgaaggctggctttatctggccgtggttatcgatctgtggccgcggtcagtcattggctggtcgatgtcctcgcggatgacagcacagcttgcctgcaatgcgttacagatggcgctgtggcagcgtaaatgtccggaaaatgtcatcgtgcatacagacagaggcggtcagtactgttcaacggattaccagagcttactgaaacgccataatctgcggggaagtatgagcgccagaggttgttgttacgacaatgcctgtgcggaaagcttcttccatacgctgagggtggaatgtatccacggagaggactttgtcagccgggaaataatgcggacagcagtgtttaattatagtgagtgtgattacaatcggtggcgtcgtcacagtgcctgtggcggtctcagtccggaacaatttgaaaaccagaacctcgcttagggttgtgcccatattacgcgggtaggatcaagcttccttcagtcttttggggatcataccgtgcaccttatagggatttcacggtaatatttagtaatgctcaagttcttttatttttagatttcataaagatagaaaccataacattaaaggggggtactaacacgaccaattaacttattatgcaccttttccactgcacccgttttcccccatatagcttcagcattgcatcagcaaagctgtcatccagcgcgtagaattaaccttcaggcaaattgagaacttcagcaaatcgacaaaccagttcgaagtgagttgggttatcaacccacaaatagcattaaattagacactatgtaaaacttggaacccctacagtatcacagaaggcgttggcgtacccattgagccaaatttgagccttcataaaaggcctggtaaattttgggattattgggatcgatagctacggcctcttacatcgcttcaactcgttcggcaagcatgaatgaagagtaatcatcaccagacgacaatagtgtaactgccctctttcctggactgttccggtatcccaggagaaagtactttatcagtgttcatctctcttatgatgcccgtgaacccaaatgcgtcgcggaacctacttttaccttcttctgacaagagcaagagtctggcacgatgaataccttccatgacctccgttcattaggtcccctccggtagccccctaagttttacttttctcacggaattttttattaccgtaggcgttattcagcgtagtccgaagacgtgatcctgctcacccagtcaaacataacttgcatatgattgccattggatgtcctcacaccaacctgacacgcatttacgcctgtcgttttgccagtcaaaacctgtccatacttcatatagattttgataccgactccctgtttatagcacttattgcaaatcgagaaataatctcttcttgatggagtatattgctgaagattaaatccgtcagccggcaccagcgaaagattaaaagcgtcattacctgataattcttcaagaattgccagagactctagtttaacttcaatgcgcttatttcctttaggtttatccgaagccagaatcaaattttccttcggattaaacttcgcaatgtagcctgtgattatccgggcattattactcaccaatcgaacagggatatcattaaaacgtagaaattgaactcgacgagcaagcatagaataatcccgcggccatatttcagcttctcgcccgtaggaaatatcatttacagccatacattccataaatatatattcatctatgctaaatgaaaaagccccgaattcacggggctgaataaaacgaaataaattaacgtaacagagacagcacgttctgcgggacctggttagcctgcgccagaacggaagtaccggcctgctgcagaatctgcgcgcgagacatgttggaaacttcggtcgcgtagtcggaatcttcgatacggctacgcgcttcagacagattgtttacggtattgcccaggttggtgatagcagagttgaaacggttttgtaccgcacccagatcagagcgcagcgcatccacctgcgccagcgcggcatcaattttctgcagcgggttttcggtggttttagcggctgcttccgccagctctggttgtgctttgaaatcatgaccagcggctttgctggcattgtaggttttaccgtcgatagtaacgacttcggttttaccgtctacgccacccagttggttagccgctgttttggtagtgccgtcagcagcagtataacttgtggttttagctttaattgctcctgtcgcttcatcgtaatctgcggcgtaatacttatcgccagctttaagcgcataaccgccttcaattgtcttaccatttttatcggtataagacattttgaccaactcagcgccattagcatcggtagcgtcaacgccgccagcaattaaggcatttttagcatctgctgaaacaactgccggtgtatcttttaactcctgtacttctgttttagttgtcgcaccagcaggcattgtggttttagttgcgccagccgcaagggttactgtaccgtcagtagcaacgttaacttcataatcgccatttttggcggcatcagcaccagtaaagccaccaatagtaacaaagtacttgttattatctgcgtcaaatttaaccgcaccaccggttacagaagccgtaccattcgtaccacccgtagccgctttaatagctgcatcatcaagacccgatacatccagtgtagtaccattattggcataagctttcgttgttactgctgtatctttcacatcatacgctttctgcacgttcagtgagtccagacccagggtctgagagttgatctgcttcagatcgatatcgatagtttcaccgtcgttggcgccaacctggatggtcagggtgttgtcctgcgccaggactttcacgccgttgaactgagtctggccggatacacggtcgatttcgttcaggcgctgggtgatttcagcctggatggagtcgaggtcagactgggagttggtgctgttagcagactgaaccgccagttcacgcacacgctgcaggttgttgttgatttcgttcagcgcgccttcagtggtctgcgcaatggagataccgtcgttagcgttacgggaagcctgagtcagacctttgatgttcgcggtgaaacggttagcaatcgcctgacctgccgcatcgtctttcgcgctgttgatacgcagaccagaagacagacgctcgatagcggtgcccagtgcggactgggatttgttcaggttattctgggtcagcagcgacagactgttagtgttgattacttgtgccataaaattttccttttggaaggtttttgataaagcaatcctccatgagaaaagcgactaaaattcttccttatctgatgtaaaggagaaaatcatggctactattgggtatattcgggtgtcaacaattgaccaaaatatcgatttacagcgtaatgcgcttactagtgcaaattgtgaccgcatttttgaggaccgtatcagtggcaagattgcaaaccgccccggcctgaaacgagcgttaaagtatgtaaataaaggcgatactcttgtcgtctggaaattagacagactgggccgcagcgtgaaaaacctggtggcgttaatatcagaattacatgaacgtggagctcacttccattctttaaccgatagtattgataccagtagcgcgatggggcgattcttttttcatgtaatgtcagcactggccgagatggagcgagaattaattgtcgagcgaacccttgccggactggctgccgccagagcgcaaggacgactgggagggcgccctcgggcgatcaacaaacatgaacaggaacagattagtcggctattagagaaaggccatcctcggcagcaactagctattatttttggtattggcgtatctaccttatacagatattttccggcaagccgcataaaaaaacgaatgaattaaaataaaaattacaacaggatggatataacatttttgtaatacaggcgtgtggcataaataaaccgaaagggtatacaaaaaagacagcatctaattaaaaagagaaaaaattcaacgtattaacatatatagtgtaacgcgctcacgataaggcctatgttacatccagctatagacgacatcgctcaaaacactaccagacacagtattcacctggaaaggctttttaatcaaaatgttagatgtaagcaattacggacagaaaaaatagtaaagtttatgcctcaagtgtcgataacctggatgacacaggtaagcctggcataacattggttatcaaaaaccttggttttcaagaaccaataaatcgtgtggctgatgcgctataaaaatcgcagagcggtgacgatattccgcataaggagctgttcgttcgcaacattcgaacggtgacgttaaagccggtttcattggctaatgaagacgaaggggacaaaattcctacagagttgataccacagagatagtccaggctcgcaggtgatacgggatttaacgccggaaagtctgcacagaacacgatctgccgccggacaccattaaattgccccgcaacgtgttatcaatactactccctacgtttcccgttaccttgctgtcggtacgtttacctcattgtctgaaaggttatttgcgaagttatcattaataatccacgggcgtctggtatgcgaatccagttccccaatcctggcgctttgcctgtgcgaccatacgcgcgtaaataagcctgaaaccaaacttcaccgcttaacgctctcatctttcccgatttttacgcaaaaaatcatcacatgatcaagtgtcatattagttattgcattttacaaatgatattggtaattattatcattctcattaacgacttgttcgatttatgacgtggagagagaggatttctcatgcgtattctgtttgtcggtccaccactgtatggactgctataccctgtgctgtctctggcgcaagcgtttcgtgttaatggccatgaagtactgattgcaagcggtggcaaatttgcacagaaagcagccgaagctgggttggtggtatttgacgctgcgcctggtttcgattcggaagcgggttatcgccgtcaggaggcattacgaaaagaaaataacattggaacaaaaatggggaacttctcattcttcagcgaagagatgactgacccgctggtcgcgttcgccgggcagtggcgaccagatctcatcgtctaccctccccttggggtcgttggaccactgattgccgctaagtatgacattccggtagtgatgcaaaccgtcggcttcggtcatacgccctggcacatcaaaggcgtgacgaaatcactttctaacgcctaccgccgccatggggtcagcgcgccaccaagagatctggcgtggatagacgtcacaccgcccagcatgagcatactgcaaaatgacggagagccggttatctccatgcaatacgtcccgtataacggcggcgccgtctgggaagaatggtgggaacgtacacctgatcgcaagcgtcttctggtcagcctcggcaccgtcaaaccgatggtggatggcctggatctgatttcctgggtaatggattctgccggcgaagtagatgccgaaatcatcctgcatcttccggcaaacgcccgctcggatttacgttcactgccgccgaatgtccgtctggtcgactggcttccgatgggcgttttccttaacggcgccgacggttttatccaccatggcggcgcaggcaacaccctgacggcgctgcatgccggcattccgcagatagtctttggccagggtgccgacagacccgtcaatgcccgcgccgtggtcgagcgcggatgcggcattattcccggtaagagcgggcttacgagcagcatgattaataccttcctcggtaatcgcgcgcttcgcgaggcgtcgcaggaggtcgcggcggaaatggcggcccagccttgcccgaccgaggtggcaaaaaaactgatcgccatgctgcaacacggctaaccgcggcagcgcaatgacaatatggcggctgaacccagcgtgtgtcgccatatctcatctttcaccgataaggaggcttaatgcccgcgactcattcccccatgcccgctcgtgcctggatagttcgccttgcccgcgtgtgttgggaacgtaaaacactgagcatcattgtcatcgtagcatcagtatcgaccattttactggctgcgctgacgccgctaataacgcgtcaggccgtcaatgacgcgatagcaggcgatacgacccacctgccgttacttgcctgcggcctgctgttaattgccctttttgattttatcgggaattacgtgcgccgcggctatgccggagaactctcgctgtgggttcagcatacgttacgtagccgtgcgttcgacagtattcaaaaactggacggcgcaggccaggacgccttgcgtaccgggcaggtcatttcgcgtaccaacagcgatcttcaacaggtacacaccttgctacaaatgtgcccggtgccgctggcggtactcacttactatgtggccggtatcgcggtgatgctatggatgtcgccatccatgacgcttatcgtgatttgcgtactggccgcccttgccattaccgccctgcgcgcccgtcgccgtgttttcgcgcaaacggggcttgcctcagaccggctggcgcacatgacggaacatatgcgcgaagtattggaacagatctcagtggtgaagtcctgcgtggcggagttgcgcgaaacgcgttggctcgatggtcagtcgcggcagatggtgcgggtacgcatcggcgccgctatctcgcaggcgatgccgggcgcaaccatgctggcgctaccggtgatagggcaaatcgtcctgctgtgctatggcggctggtcggtaatgaatgggcgcatcgatctgggaaccttcgttgcgttcgcgagttttctcgctatgctgaccggccctacccgcgtactggcatcgtttttggttatcgcacagcgcacacaggcgtcggtggagcgcgtcttcgcgcttatcgacacgcgttctcgcatggaagacggtactgagtcggttgaaggtcagattatcgggctggacgtggagaagatgagtttccactacgacaacggtaaccgtatcctcaatgagatctcgttttccattcacgccggtgaaaccgtggcagtggttggcgcctccggctccggaaaatcaacattgctgatgttgctggcgcgcttttacgatcccacctccggcggggtgtggctcaacaccactgcgggtcaacagaatattcgcgacctgaaactgacggcgcttcgtcgtcgcgttggcgtagtttttgaagacgcgtttctgtttgccggtacggtggcggaaaacatcgcctatgggcacccgcaagcgactcaggacgacattcgacgcgccgccgatgccgcaggcgccagcgggttcatcaatgcgctaccgcaggggttcaacacccgactggccgaacgcggaagcaacctctccggcggccaacgccagcgtattgcgctagcccgggcactgattaccgcgccggaactgctgattctcgatgacaccacctcggcggtcgatgccggtactgaagcggaaattaacacggctcttggtcgttatgccgataatgagcatatgctgctggtgattgcacgccgccgttcaacactgcagttagccgatcggatcgtcgtgctggataaaggccgcgtcgtggatatcggtacccaggcggagctggatgcaaggtgtccgacgtttcgctcgctgatgagcggcgagggggattttctcgcccttgccccggcagaacaacgtacgctatggccaacaacgcaggcggtaaaatccgacgacgcgcatgagcgccagacacccgccggaaaaggttttgtcgaccggatgacgcgcgttccagaacgcgccgtacagatggcgctggcaggccacgggcgtcaagtctcatcgctgctgacgccagtagcctggatgttcgtcatcgccgccctgcttatcgcgcttgattccgccgcaggcgttggcgtgctggtgcttttgcagcgcggtattgactcaggcgttgccgcaggggatatgtcgactattggcatatgcgccctgctcgcgctgtgcctggtggcgatcggttggtgctgctatgcgctgcaaacgatcttcgccgcccgcgcggcagagtcggtacagcatacggtacgcttacgcagcttcagccacctgctacgcctgagtcttccctggcacgagaagcacatcgactcgcgtcttactcgcatgaccgtcgacgttgattcactcgcccgatttctgcaaaacggtcttgccagcgcggccaccagcatcgtgacgatggtcgctatcgccgcggcaatgttctggcttgaccccattcttgcgttaacggcattaagcgccgtgcctgtagtgatgctggcgacgtggatttaccgccgtttgagctcgcctgcctacgcccaggcacggctggaaattggtaaggtgaacagtacgcttcaggaaaaggtctccggtatgcgggtagttcagtcacacggccaacaacagcaggaagccgccaggctacgggcgttatcagacaacttccgcgccacccgcgtgcgggcgcaaaaataccttgccgtttattttccgttcctgaccttctgcaccgaggctgcctatgccgccgtgcttttaatcggggcgagccgggtcgccggaggcgaaatgacgcccgggatactggcggcgttcttcctgctactgggacaattttatggcccggtacagcagttgtcaggcattgttgattcctggcagcaggcgaccgccagcggcaaacatatcaatgcgctattggcgactgaggaaacggagaatattgaaccgtcctccataacacctggcactggcgcgctacgtctggaggcattgacattcctctatcccgaaaaaacgcaacctgtgcttgataatctctcgctcattattccgccaggaacggtagtcgcggtggtcggacgtagcggcgctggcaaatcgacgctgatcaagctgctggccgggctctactctcccggtagcggacaaatccgtgtcggtgagcgcttaattgatgccgcgtcgcttagtgattatcgtcgccagacggggctggtcactcaggatgtcgcattatttagcggcgatattgccgaaaatatccgctatccgcggccagacagcagcgacacggaggtggagagcgcggcgcgacgggcgggactctttgaaactgtgcaacatctgccgctggggtttcgtactccggtcaataacggcggcacggatctgtccgcgggccagcgtcagttgattgccctcgcccgcgcccacctggcgcaggcgcatattctgctgctcgacgaggcgacagcgcgtatcgaccgtagcgccgaggagcgcttaatgacctcgctgaccagggtgacgcataccgagaaacgcatcgcgcttatcgtcgcgcaccggctgaccaccgctcgccgctgcgatgtgattgtcgtaatcgataaaggatgtatcgctgaatatggcagccatgatcagttgatagcggctcatggcctgtatgctcgtctgtggcggaacagcatcggccagacacgcgatacgcaaggagaggtcataggatagtttttatcgccacgatttacgcaaaagaaagcccgcaagcggctgttcatgtaacagccgctttagctattgatactgaccgaaatataaacgagatggaatacaaagaatgagactgagcccgcccgtcgctcctgtcgctatacagaccgctacgcgccttcgccgtcaactcgccgccggaagccaggttgacgcttctcacttctggcgagaagcaaactcgctcgcactgccgctggtgacagccattaacggcgcagacgatgaacgggaagtcaccttcctgtggcgtgccgcctctcctctgcggggggtttatgttcgcctgaaccgtgtcaccgataaagataacgtggcgaaaggtatgatgacgcaactgcccacaacggatatctggcatctgacgcttcgcttaccggcgtcctactgcggttcctatacgatggtcgaaataccaccggaaaccccgggcgagacggtgttgcagcttggaagccgtttcgcctcccttgtcgggaaggcggatccgctgaacagcgcgccgggaataaatgttcggggcaatgcgcaggaatccgttctggcgctggatcatgccccggcacaggaggagtggtcaggctgtcgcgcttacgccgggcagcttttcacctcagagcatcggctcgccggacaacgtcgccgtgtgcggctgtatcttcctgacgttcctgtcgtacaaccgctgggcttgctggtactcacggatggcgagatctggttcgaccatcttggggtaagcgccgccattgacgccgccatccgcagcggacgcatcgcgccggtggccgtactcggcattgataacatcaacgcgcgtgaacgcgtcgcaatactcggcggtcgccgcgagctggtgctcgacattgccgaacgcctgctgccaacccttcgcgccaaatacccggaacggcggtgggcggaccgtacacaaacggtgctggcagggcaaagccttggcggcgtgaccgcgctgatggcggcccgccacgcgccagagagcttcggcctggtgctgagccactccccctcaatgtggtggacgccggacaaccgcaaccgcccgaaccatttcagcgcagaagagcgctcatgggtcagcgaacatgtgttatccgcgccctcgccagccgtacgtacgcatctgtgcgtgggatcgctggaaggttcgacggtcccgcaggtcaaacagttgcatgaaaaattgcgcgccgccggcgtcgaaagccattacagcgtgtacaccggcggtcacgattatgcctggtggcgcggcgcgctgattgacggattacgtctactgccccgataaaacttcacctgccaaaaaggaataacatccgatgtatggtcgccagtaccacaacaagcgctatcgcatggcgctatttttagtgagtttttgttttagcgcgctgagttatgcgcagccggatatgcagccattagggccgaatatcgctgataaaggttcgggatattaccatttcagggtcaatgactttcaatctgccgatggcgcaagacattaccgggtatggaccgctatccccaataaagccgccccgccgtcgggttatcctgtcttatatatgctggacggcaacgcagtgatggacagactgccggagacgctgctcaaacagctggcagaccactcgccgccggtgattgtagcgattggctatcagactaacctgccgtttgatcttaacggcagagcttatgactatacgccggcgccgggaatcgatcgcgatgacagtgaaaataacccgcgttttcatcgtaaaaccggcggcgggccagcgttccgccagctactggagagacatatcgcgccgcaggtggaacaaggaataaccatcaactccgaacggcgcggggtatggggacattcttatggcggcctgttcgttttagactcctggctgtcgtcatccttctttcatatctattacagcgccagcccgtcactcagcagggataactttgtcctgttgaatcgccttacgacagtgaagccgtcgctgttctgccataaaaaactcatcataatggaaggttcagcgtcgaatggggatagcaggcaacgccagatggccgagctcctacaaaaagttcaggagaccgtgagaacgcttgagaacaacggcgttaacgcggccctgcagcattacccgggcctgggccacgggcccatgtttaacgcctcttttcgcagtgcattgctggatatcagtcgcgaaccggcaagccaaaaaccacgctgccattaacccgccgccagaatatgcccgccagcggcgggcataatccatcaaaacgaggccgtcacaccggcataataagcccgccccggttcgttataggtatttgccccttcggcggagcgatagatctgtttatcgaagatattgctgataccgacattaagacgcaggttcttattgatatcgtagttaacgttagcgccgaccagtgagtaagcccccagcgctttcccggacaatcctttggtctcttcactacgcgactccgcatgtgttcgcggtttttgcttgccgtataacgtccagttgacgttagcggagagcgcgctggtgatagtccagtcgaggaaggtattcaccgtatatttcgggattatcgataagggattgccggtatctttttgctcagaagcaatcatataagtcgcattggtattccagttcagacggtccggcatcagcggaacagccatgctggcttcaataccttcaatcagcgctttaccgccgttctgccactgcaatacataagcgccagatgcgcttctgccaataatctgatcacctgcgacaatcttattctgataatcgttacggaaatacgttacgcttgcgtgataatcgtctacggtaaattccagcccaatctctttattgatactaatttcaggatcgaggttcttattaccaaccaggtaacagccgcccgacgtaatatcttttggacaaccgttgcctttcgaatagagtaaatacccctcactggtttgatacaagttcggagccttaaaggcacgggcaataccggctttcaccttgacgtattcacctaactcctgggaaaggttaagactgggactaaaattactcccggattcgctcaaatagtcaaaacgcagacccggaataatattggtaccggccataggttcgatattatcttcaacgtacagcgcactgatttccgatttatttttgctgctacggttagccgccgaaccgggaatcccggcgatattgctatccttaaccgtcagactggtagaggaaggatcgttcagctcatcgcggttccactccgcgccgacggtgagcgtttgctcaaatagccatatcaccgggacattcacctcgccgctggtgcgatacgaggtcaggcggttagtggtgaacgtctggtcgttggtaatacgcccctcgccgccgccggagagcccctcattcatgcgggtgttatcggttttttcatagtagaaccccaggcggctttgcccccagtcccagatgccgttatgagttagaccgtaattctgccggtacaggcgattggtctcccgcccggactgcgccagacttttggtaaccgcgtttgaagtactgttttgcgtatcgccagcataaatattcccctgccgactatatcccgcttcaaaatcaaggatttgctgcggggtcattttccatgagaagacgctattaatatctttattggtgaccccctcccgtccggcggcatttttggtaccggcggaggagttaatatcccagctatcggcatcggttctgttgagattaccgtacaggcgcatcgtcaacgtatcaccagccaacggaccgctaaggctaaagttaccccgccgggtgtcaccttctttgctgctttccggctggttggtatagagcgacagcgagccgtgccagtcgttagtcggacgtttggtgatgatattcaccaccccgccagcggcaccggagccatagcgcgcggcggcgggcccacggatcacttcaatacgttctaccatctccggcggtacccagttcgtatcgccacgggtgtcgcgttctccgcgccagctatagcgaaccgaatttcgcgacgtcaccggcacgccgtcaatcagcactaaggtattttccggccccataccacgaatatcaatttgtcggttatttccgcgcgtccccgaggcgctattgccggtaagattaaccccaggcatcttacgaataatatcggcaagatcgttaacgggaggattcttttgaatatcgtcacgagtaataatcgaaacgcccggctgttgctttaatacttgctcggcggtggattcaaccaccatcgtttcgccgttgtcgtcagtagattctgctgctgataatggactattaacccctgtagaaaccacggttattaaccagatgaacttcttaactctcatacccattccctaaataatgtctaaagtagcgctgttgccctcaagctcacatccttgccaggttacgtctatatagtaattattatcatatgctaatgataataattatcattcaattaaggaaaaggcaatctttcgaccacaaaaatctggtaataaaaaaacggaaacgggattttgcaatatgactctctgtccgggctccgctttgccagtaaatccgggaaggggggcagaatgcgcctactgaacggaggttttacaaaacagaaatagataaaataaaactatttttcagatcgttaatcacaagaaacacccaggtaagatggtatagcacggttcagggttcaccgccgcttccctgccgacggcgaaccattcttacagtttgccagcgactttccgtctgggtaatggcgggatcggatacgattgtagccattcgatatttgatgatgaaagtgatgttggcaccaacatacaaagcgcctggtaatatttatcaggcgctttgcagacagaaaaccatcaaacatcagtttctcgttctccaggaactactggaaaatatggcaacccacagttattgggttttactgtcgggtcttgccagggattttgtgttacccccaggtcttttaaaagaccgcgtaacagcactaaatccctgggtgtcattttttgctttggttcaccctctttaggtggacgaatatcctcctgactagtacatgtaacacaataaccttttaactctatccacttaggcttaggggggccttaggatcgggaggcgtcgagctgacaacgcacgaacaggcacttatacatccaggcatagcgttttccttttcaaacaattcgctttagttggaagttctacttgagaaaataggaatggttattcagatatttttaccgtcgcatactcctgtaataataaaagatactgtaaataatttactctcagctactattcagtagcagattgttattcttacattgcttttatttcagatttacgtcaaaaagggctaaatattttcactataaaattcgttaaagagtgtttgtgtgcttgtagacattgtggcgtcttcagtacgcaaatcggttagtgtacaatctttaaaacaggtattgtttaaattagcctcagccaaatcagccccgtccaggttcgtagaaatgaaactcgcctttcgcaggtttgcccgggttaagacagcgccttccataattgcagccattatagtagcaccctgtaatgtcgcaccgctcatatcagcacgtataagggttgcgcctgaaagattagtgtgatccatatttgcaccggagcaattacattctatcatgctacagcctaacagactcgcgtgttgtaaattggcgccagtaagattagcgtgatcgagggtagcgccacacataatgctatcttccagacaggcgttcttgaaattactgtcgcctagtgatgttcccgatagatttgcgcccttaaaatttgcaccttcacaatccgccataaacagcactgccccctctaaatttgcgccgcttaagtctgcgtcacataaattttctgacgtcagatttgctccggtaaggacagcgcctttaagattcatgcctccctgggcagttaatattacagaatcctgagggagagaaaattcgcatctgaatagtaaagctcggcatattttttcaaaagaggcaagcggaatttctcttgtctcagaatggtcgcctttactgactcgtacaataacttgtccagcttcgttattctcaccaggaagattaaattcgacacgacacccatccatatcatccaggatgatgttttctggcaacggagcacctctgtcaggcattgtacttttcaatgtctcagccatagtctctatcaattcctgatattgtgtttcatttctccgacgtatcccaccacaggtaaaaaagttaatgatatattccagaatggttttgggcgaggtagcttgccgcatagcagcagaagtccccgcgccaaaagcagatttagccataccagccagactatcgagtgaacgctccatatattttctcccagagacagcaacacagtgcatgataaaatttatcatatagatttgcatttagagataaggtgaataccccctttacgtctggttacataataacgtatcacgacgcgttgctgtctggcttacacaatagcagccaaataaatatattggcttatactcgtcatacttcaagttgcatgtgctgcggccgcgttccctcaccccagtcacttactttagtaagctcctggggattcgctcgcttgccgccttcctgcaactcgaattatttagagtatataacatcatttaaaataataaacacggcattcgttttaatactacgttctggactcatcccactcattagcagaaaacctattaaaaagcgtgttcaggcattttattaccgccattgataaactgtttaacaacatcgtctgtacagaccttcttcgttgcctttacgtttaactcaatcaggctaccgtctcggttataagtctatcgagtagtagagccgtagtatgacgatgcagcaaagtgatatggaaagatataatccattattaatgttaaaagaagtcatggcgcagacgccttatcgccataaacgctggggagagcgtaagtttcgctataaatttttattacgttgccttattaaccccgtaacgacaattaaatacttcaatgaattatgccatctgtctcagcccagaacgctgattattcatcgtccactgttgccggcaaaaatccagcggccctatttgtataccgggcttagcatacgttgccgggcaaaagctattctggaacactaccagttcgttcagtcctttccggaaagtaaaattaaaaagatcctcctgtccgaggaacaaatcttactcgctcacctggaaggaaaaaacggtgctctggtagatatctactgcggtccctgtggctatgacagagaaggtgaactgacattaacgctgtgcttcaatgatacgccgttggcacgtttatcattttcctttatccgccatgaagggaagcaaatagcgctggttgccgggttacaagggcccagtaaacatatcggcccacaagtcatacgtaacgccaccaaagattgttacggtctctttcctaaacggatgctgtatgaagcatttgcgacattgatgcaggcctgtaatgtcgacgagatttatgcggtcagtgaaaacaaccatgtttatcgtcaactccggtacttattccagaagaaaaaaacttttgtggccagctatagtgaattctgggagtcgctaaacggcgttaagaaaggtgccttatatcatctgccatcacaggtgatgcgtaaagcgcctgaaagtatccccagcaaaaaacgcgcagagtatcggaaacgctatcatattctggatacaataatacaagaggtcaacagcctctcccggtagaactatttcatacgcggatgtgcagatcctgctaccgttcagcggatcttttgaaatctgtatcgctactggatggttaaatacagaatggcttgcgagtgaatagcgcggcattaaaccgtcgctttcactcatgttatgatcaacatcttaatcttattcccttcaccataacgtcatcgattagcatgttaaccattaaatacaagctaaacatttgtcacatttttatttggttaagcaaaaaaataatacaaaatagcattttcagtaagctaagtcaggagttttggtgaaaatacaagaagttaagcgtatattaacccgctggcaaccgtcttccttttccctataccgggaggtgtttacgcaatacggcggtagtatcaatatgcacccagatattgtggattatttcatgaagcgctataactggcattttaaattcttccactataaagaagatgataagattaaaggcgcctactttatctgtaatgatcagaatattggtatcctgacgcgcagaaccttcccgctatcttcagatgagatacttattccgatggcgccagatttacgctgcttcttgcccgatcgtactaaccgactttcggcgttgcatcagccacaaatacgcaatgccatatggaaactcgccagaaagaaacaaaattgtctggtcaaagaaacgttctcttctaagtttgaaaaaacacgccgtaatgaatatcagcggtttcttaaaaaaggcggaagtgtaaaaagcgttgctgattgttcttctgatgaactgactcatatttttatcgagttatttcggtctcgtttcggcaatacttcatcctgctatcccgctgataaccttgccaacttttttagtcaactgcatcaccttctgtttgggcatattctttatattgaagggataccctgtgcatttgatattgtactgaaatctgaaagccagatgaacatctactttgacgtatctaatggtgcaattaaaaatgagtgcaggccactcagtcccggcagcatactaatgtggctaaatattagccgtgccagacattactgccaggaaagacaaaaaaaattgcttttttccatcggcatactaaagcctgaatgggaatataagcgcatgtggtcgaccccctattttaccggaaaatcgatttgctaaaaagaaagcctggacgtaaatatgttttttacgtccagatttttcataaatcctgatgaactgataaaaaacgaaaatttaatcagaatttaaaaaataagttaaccaccatataatcataatgacaattactcgaaattcacttacactatactcggttttatggaattgattaacacggtatgttacagataacgtgctaaaaagcgtgcagcggttatacattttcatatgtgtgtgtcattaacctggcgtcaggaacagatgatgatgacaactacccttttatctcttctggcctggcataccgtcagtagattaaaggagtagccttgctttatggcattacaaaaatgcgggtggggtctatgctcaatgtatacgttatttgtaacaacgctcttgtgcataaacaatacgttattgccaacagcactgaacgggtacagtggttcttgctgacaacaggcttaaagatcgccttaacacgggatacctgataactggattatattatgacacatgcagactggctgattcttgggtatacaactgttattattatttttggtattgtatgttatatcggattgcttaaattgataacgaaaggcaagcatgaaaaataacgcacttaccgggaagaatatactctcaggagataaaatgcttcggcaatgatatgacaccactgccgaaatgctatttttaaagaaatcaatcaggtattgagggtgattttatcatagccgcgccagcgataattcaacaccgagagcagccagaatagcacaaaagcacccactacccagaagcccacattccccatatgatcgttaagcgtgctgacggtctgccaaaatgttccgcttaactgtaacgcatcatcaatcaaccccagcgcctcaagcccgccaatcgccagcgcgacaatgacggatgcggcggtaatggtcatattataataaagcttacgtaatggatgcgagaaagcccaaccgtaagcgccgaccatgacaaagttatccagggaatctaccagcgccatcccggcggtaaacagcacaggaaaaatcatcattgaccagagagatagcccctggttagctgctgaagcggaaatgcccagcaacccaacctcggttgcggtatcaaatcccagaccaaacagaaaaccgacaaaatacatatgccaactggaagtgaccaaacgaaacgtacgctgaaatatacgcgtcatcagcccgccaggtatcgcctcgtcatgcgccctcactgactcgccgcgggtaaccgagcgaaattgccgccagacgttgaacaaaataaacaggttaagcagggccatcgccagcagaaaaaaagcggaaacagccgtaccaatcaacgaaccatattgatgcaaaacatcaatacgatcgcgaaatgccatcgacgtcacaacaatcgccagacatgccagaacgacaatggtcgaatgacccaatgaaaaaaacgcccccacgcctaaaggcgttttaccctgctgcatcagtttacgggtgacggtatcgatggctgcgatatgatcggcatcaaccgcatgacgcagcccaaagctatacgccagtatggctgcgcttagcatgacggcatggtgatgaaaaacacagaacgcccaaatccaggccaggatgttaaccccgacaagaaagacggttaatgctattccccgtcgtttagtatgattattcatgcccctgcacccactatatttttaattaacgctacggtttgtagggggaatgtatgatcatttgattaaaacgtcacacctcaagatgcgactttttgtaaacgtgctttaccgctgacacatttgtccgcattactgcggaacaaggcttaaaaagcgtatccgaacgtataaccctcccaacgcttcgctacgggaaaaatggggatgagtacggtgcaggcgtgcgatatcattgaccaaagccagaccaatgcccgccccggccacatttcctacgttatcgagccggtggaacggctgtagcgccagatggatgtgttcatcatcgatgccgggaccgctatcttcgacaaccagcgtcacggcatcgccatcccgttcaagccgcgcggtgacgatgccttgctcaggcgtgtatttcagcgcattatccagcaagtttccgcatagctcgctaagcagtacctcatccccctcgatccacatcgcttcctgttcgccttcgtagcccaggtcgatatgtttactgcgcgcctgcgccagacgggtaaaacagccgctctgtacgatatcgtacagattcaccggggaaaaacgccgctcgccctgctctttatgctttaccgcagaaagttgcaacaatctttccgtgagctgaatggtgctatccagcgttacgctcatcgcctgcagactttcgtaccagtgatgagggtgctggctggctaacgccaccgccgcctgcgtttttaacaccgccagcggcgtttttaactggtgagaagcatcggcgctaaagcgttcctgccgggagaggatgccgcggagcctgtcaatgtagcgattaaacgccacgattaacaagcgtgtttccgaccacggcagcagttccggcagcggcgttaacagacccggttcgcggcgtaccattaatgacgaaagttgacgcatagggcgcaggatccggcgtaataaccagccaaccagcaccagggtcagcaacaccagcagaccctgtgagatccaggaagagaacagcagttggcccgccagataacgacgggactgcagcgtctctgcgacataaatctccgccatgccgataatgccgccttcgttgaccggctgtagcaaacgcgccacgcggatcgcctcgccgcgatactcggtatgatagaaccacgccagcgccggataaagccgggtacggggcgtagcgggcggcatgacgggcagatcgtcataaccggaaatgacctttccggaagggtcgacgactttgtaatagagtcgatcattcatattaagctcgaagctatccagcaccacccagggcacgttaacttccagatggttattgcgcaccaccagccgttccgataccgttcgcgccgaggagagcaacgtacgatcataagcctgagtggcggcctgtagcgcattgacataactgttaaacgccgacagcccccatagcagaatcagcggcaaccccaggaacagtaagagttgcaggtacaacgattgcggcttaacccacttcatcgccgcgctccagcacataacccaggccgcgcagcgtcgtaattcgtacatcgcttccctgaagttttttacgcagtcgatgaatataaagttcaatgctttcagggcttacctcatcgttcaggctgaacacctgttcaaaaagctgctgacgcgaaactggtcgcgttcgtcggtacatcaatacggttaagagcgcctgctcacgcggcgtcagcgctaacggctgcccctgtaacagaaaatacccttcatcatgaaagatcaattcccccagttgctgaacttcatgaacctgcccagcgctgcgtcggagcaaggcccgtaaacgggcatccagctcttccagttcaaagggtttcggcagatagtcatccgcgccgacgttgagaccttttacgcgatccgccaccgcgcttcgcgccgtgagcagcaaaacgggcaaggtctgaccgcgtttacgcagccgttgcaccacctccagtccatccattcccggcatattgatatccagcaccgccagcgcgtacatttcactgtgcagaagatggtcagccgccaggccgtcaaatacgcagtccacggcaaagccgttttgcaccagcgctttctccagccagtgagccagctcacggttatcttctgccaataagagacgcatatcacatcctgtaaagtttctgccgcattgaaagggaattgaaaggttattgttttaacaatcacgcaaccgaactgctacatgtcggctcacataatcacaaaaatcttcttccgaacctgaaaaatccggacgtccggcgtgaggataaaaaatgaaaaaacaattacttcgtacccttactgcaagcattttattaatgagtacctctgttctggcgcaggaggcgccgtcgcgaacggaatgtatcgcgccagccaaacctggcggcggtttcgacctcacctgtaagctgattcaggtgagtttgctggagactggcgctatcgagaaacccatgcgggtaacgtatatgcccggcggcgtcggcgctgtggcctataacgcgatagtcgcccaacgccctggcgaacccgggactgtggtcgccttttccggcggttcgctgctcaacctgtcgcaggggaaatttggtcgctacggcgtggatgatgtgcgctggctggcaagcgtgggcactgattacggcatgatcgccgtgcgtgcggattctccgtggaaaacgctgaaagatctgatgacggcgatggaaaaagatcccaacagcgtggtcattggcgctggcgcctctattggcagccaggactggatgaagtcggcattgctggcgcaaaaggcgaacgtcgacccgcacaagatgcgctacgttgcctttgagggcggcggcgagccggtgacggcattaatgggcaaccatgttcaggttgtctccggcgatctcagtgaaatggtgccttatctgggcggcgacaaaatccgcgtgcttgccgtcttttcagaaaatcgtctgccgggccagcttgccaatatccctaccgctaaagaacagggctacgacctggtgtggccgattattcgcggcttctacgtcgggcccaaagtcagcgatgccgattaccagtggtgggtggataccttcaagaagctccagcaaaccgacgagtttaaaaagcagcgcgatctgcgcggcctgtttgagttcgacatgaccggccagcagctcgatgactacgtgaaaaaacaggttactgattaccgtgaacaggcgaaagccttcggactcgcgaaataatcgcggaggcaatgatgagcgatcgtatctttgcgggtatctggctgttgctctgtatcgccgggctattcatcgcctggcagatccaaagcgaatacagctatgaacccgtcggcccccgcccttttccgctggggattatcggcctgatggcgctctgcgcgctggcgctgttattgcgccatcccgacacggtgagctggccgcgccgccatgttctgcaaaagctaattaccatgatcatcatcctgttgatgtatgcctggggattcgaatggctgggttttcccatcgccaccgcgcttctcaccatggttatcgggatgctgttcggcgccacgattccggcggcgggtatctccggcgcggtattgggcattctgctgtggtatgcctttgaccggctgcttgatgtcaccttacctctcggcgcctggctgagttaacggagcaacgatggatacctggatatatctttctcagggctttgcggtggcgatgacgccggaaaacctggttatcgcgttgattggctgcttcgtgggcacgatcgtcggtctgctgccgggtctgggaccgatcaacggcgtggcaatcttactgccgctggcctttgcgttgcatctgcctgcggagtcggcgctaattctgctggcgacggtgtacattggctgtgagtatggcggcaggatctcctccatattgctcaacgtccccggcgatgcggcggcgatcatgacggcgctggacggttacccgatggcgcagcaagggaaaggcggcgtagcgctgtcgatttccgcagtcagctcatttttcggttcattaatcgctatcggcggcatcattctgttcgcccctttactggcgcaatggtcgctggcctttgggccggcggaatatttcgccttaatggtttttgccatcgcctgtcttggcagcatgatggcgcaaaacccgcttaaatcatttctggcagcgctgatcggtcttggccttgcgaccgtcggcgtggacgccaacaccggggtttatcgctttacctttgacagcgttcatctttccgacggcgtacagtttatcgtcgtggtgatcggcctgttctcggtatcagaaatacttttaatgctggaacataccagcagcgggcaaacaatggtccgcaaaacgggtcgaatgttgttcaacctgaaagaaggcgcgcagtgtatcggcaccaccctgcgttcttcggtaatcggcttttttgtcggcgtattgcccggcgccggggcgaccattgccagcgccattacctatatgaccgagaaaaaactcagcggcaacagcgatagcttcggcaaaggggatattcgcggcgtcgcggcgccggaggcggcaaacaacgcctctgcctgcggctccttcatcccgatgctgacgctgggcgttcccggttccggcactacggcagtgatgatgggggcgctgacgctgtacaacatcacgccaggcccggcgatgttcaccgaacagccggatatcgtctggggactcatcgctgcgctgctgattgcgaacgtgatgctgctgatcatgaatatcccgttgatcggtctgttcacccgtatgctcaccattccgctgtggttcctggtacccgccatcgctgccgtatcggcggtaggggtgtatgcggtacacagcaccaccttcgatctggtgctgatggtcgcgctcggcgtgttagggtacattttacgtaaaatgcacttccccatgtcaccgctgatcctggggttcgtactgggggaaatgctggagcagaacctgcgtcgcgcactctccatcagtaacggcaatatggcgattttgtggcaaagcggcgttgccaaagccctgctgatcatggcgatcatggtcattgtcgtaccgccagtgttacgtctgctccgtaaacacagccgtaaaccgcaggttgacgccggttaattgactgctgaaatacgttgtacttgtccggcctacgcgctcatgtgtcaggccgggcaaccccgccagcatcactttccccataacgctctcattttacaccccttcttgccgttgtcaggctcgtggcgccgttaacctcaccctttgcattgttaaatatttgttgtttttgatcacaataattaaacaaaagcggttatttcatacgcattcctggaaaatgtcgatatttttaatttatggctacgaaatgagcatcgccatgtctccctgaccatctaccgagaggaatgattctgatgaatgcactgactgccgtaaaagcgaacacagatgatttagcccaacgccatactggtttcacccttgccccttcggcgcagtcgccgcgcctgctggcgttaacgtttacggcggataccacaaaacaatttcttcatcaggttgcgcagtggccggtgcaggcgctggaatacaaatctttcttacgttttaaaatcggcaagatcctcgacgatctgtgcggcaatcagctacaaccgctgttgatcaaaacgctcctcaaccgtgcacaaggcgcgctgttgatcagcgccgaagggatcgatgatgtcgcacaggcagaagagatggtcaaactggcgacggcggtggcgcatcttattggtcgctccaactacgatgcgatgagcggccagtactacgcgcgtttcgtggtcaaaaacgtcgacaactccgacagttatctgcgccagccccaccgcgtaatggaactgcacaatgacggtacctatgttgaggaggtgaccgactacgtgctgatgatgaaaatcgacgaacagaatatggaaggcggtaattcgctgttgctgcaccttgatgactgggaacatctggagtcgttttttacccatccgctggcgcgtcgcgtcatgcgctgggcggcgccgccaagcaaaaatgttagccatgacgtctggcacccggtgtttgatgtcgaccaacaaggccgcccggtcatgcgttatatcgaccagttcgtccagccaaaagactttgaagaaggcgtctggctcagcgagctttcagacgcgctggaaaccagtcaaaacatcctctccgtaccggtaccggtcggcaaattcctgttgattaacaatctgttctggctacatggacgcgatcgttttacgccgcatcctgacttgcgtcgcgaactgatgcgccagcgcggttacttcgcctacgccgccagccattatcaaactcaccaataagcgccacggcgaaggaattacgcggatgtatgattttgtgattatcggcggcggcattatcggcatgtcgaccgccatgcaacttattgatgtctacccggatgcgcgcatcgcgttgctggaaaaagagtccgcgccagcctgccaccagaccgggcataacagcggcgtgatccatgccggggtgtactacacgcccggcagcctcaaagcgcagttttgtctggcaggcaatcaggcgaccaaaaccttttgcgatcaaaacaacatccgctacgacacctgcggcaaaatgttggtcgccacctcggagctggaaatggcgcggatgcgcgcgctatgggagcggacggcggccaacggcttagagcgcgagtggttaagcgcggcggagctgcgtgaacgcgaacccaatatcattggcctgggcgggatttttgtcccttccagcgggattgtcagctatcgcgatgtcgcgacggccatggcgaaccgctttcaggccaaaggcggcgagatcatctaccatgccgaggtcagcgcgctaacagaacatgccgctggcgttgtcattcgcacctcgcaaggtcgggaaatagaaaccgctacgcttatcggctgtgcaggactgatggcggatcggctggtcaaaatgctgggcgtggagcccggttttattatctgccctttccgcggcgagtactttcgtctggccccgcgacacaaccggatcgttaaccatttgatctacccgatccccgatccggcaatgccgtttctcggcgtccatcttacccgcatgatcgacggcagcgttacggtcgggccgaatgcggtgctggcgcttaaacgcgaaggctaccgtaagcgcgacgtttccttcaccgacaccctggagattttccgctccgccggcattcgccgcgtactgcaaaaccatctgctttccggactgggcgagatgaaaaactcgctgtgcaaaagcggctatttgcggcgagtacaaaagtattgccccagcctgaccgtcaacgatctccagccctggccggcaggcgtgcgggcgcaggcggtttcaccggacggcaaactgattgatgattttctgtttgtcacaacgccgcgttccattcacacctgtaacgccccctccccggcggcgacatccgcgatacctatcggcgcgcatatcgtcagcaaagttcaggcgctacgcgcaagccagagcaaccccggacgtacgctgcgtgcggcacgcagcgtggacgcattacacgccgcatttacccgttaacccttcagacaggaagcaattatgcaacttaacgactctaccctgttccgccagcaggcctttatcgatggcgactggcgcgacgcgcgcggcggcgatgtcatccccgtgagcaaccccgccaacgggaaaccgcttggcaatgtgcccaaaatgggggcggaagagacgcgcgacgccatcaacgccgccaatcgcgccctgcccgcctggcgcgcgctcaccgccaaagagcgagccaatatcctgcgtcgctggttcaatctgatgatggaacatcaggacgatttggcgcgtctgatgacgctggaacagggtaaaccgctggcggaagcgaaaggcgaaattagctacgccgcctcgtttattgaatggttcgccgaagaggggaagcgtatctatggcgacacgattccaggccatcaggccgataaacggctgctggtgattaaacagcccatcggcgtcaccgccgcgattaccccgtggaactttccctcggcaatgatcacccgtaaagccggccccgcgctggccgcaggctgcacaatggtactcaaacccgccagccagacgccgttttccgcgctggcgctggcggaactggcccagcgcgccggaattcccgcaggcgtatttaacgtcgttaccggttcggcaggcgatatcggcggcgagctgaccagcaacccgctggtacgcaaactgtcgtttaccggctcgacggagattggccgccagctaatggaacaatgcgccaaagacattaaaaaagtgtcgctggaattgggcggcaatgcgccgtttatcgtctttgacgatgccgatctggataaagccgtcgaaggcgcgctggcttcgaagtttcgcaacgccgggcagacctgtgtctgcgccaatagattgtatgttcaggacggcgtttacgatcgttttgcggaaaaactcaaccaggcggtaaataagctcgcggtcggtgacggcctgcaagccgacgtcgctatcgggccgctgattgatgaaaaagccgtggcgaaagtccaggaacatatcgccgatgcgctggaaaaaggcgcccgcgtcattacgggcggtgaagcgcacaaattgggcggcaacttctttcaaccgaccattctggcggatgttcctgataacgcgaaagtcgccaaagaagagacattcgggccgctcgcgcctctgttccgcttcagcgacgaggcggacgtcatcaggcaggctaacgataccgagttcggcctggcagcctatttttatgcacgcgatttaagccgcgttttccgcgtcggcgaagcgctggaatacggcatcgtcggtattaataccggcattatctccaacgaagtcgcgcctttcggcggcattaaggcctccggattaggccgagaaggttccaaatacggcatcgaagattatttagaaatcaaatatatgtgcatcggcctttaacaggagagtcgctaatgaataccaataacgctttaatgcagcgccgtcataacgccgttcctcgcggcgtggggcagattcacccgattttcgccgagcgggcggaaaattgtcgggtgtgggatgtcgaaggccgtgagtatctcgatttcgcgggcggcattgccgtcctgaacaccggtcatttacatccgggcattgtttcagcggtcgaagcgcagttgaagaaattgtcccatacctgttttcaggtgctggcctatgaaccgtatctggcgttgtgcgaacgcatgaaccagaaggtaccgggcgatttcgccaaaaaaacgttgctggtcacgaccggttcagaagcggttgaaaacgcggtgaaaatcgcccgcgcggcgacaaaacgcagcggcgctatcgcgtttagcggcgcttaccacggtcgtacccactacacgctctctctgaccgggaaagtacacccgtactctgctggtatgggattgatgccaggccatgtctaccgcgcgctttatccttgcccgctacacaacatcagcgacgacgacgcgatcgccagcattgaacgcatctttaaaaatgatgccgcgccggaagatatcgccgccattattattgagccggtacagggcgaaggcggattttacgccgcctctcccgcgtttatgcagcgactgcgcgcgctatgcgaccaacacggcattatgttgattgccgacgaagtgcaaagcggcgcgggccggaccggtacgctgttcgccatggaacagatgggcgttgcggcagatattaccacgtttgcgaaatcgatcgccggcggctttccgctggcaggcgttaccggccgggcagacgtgatggacgctatcgcgccgggcgggctgggcggcacctatgccggaaacccgattgcctgcgccgccgcgctggcggtactggacattttcgagcaggaaaatctactgcaaaaggcgaatacgcttggcaaaacgctgcgcgatggcctgatggagatagcggaaacgcaccgtgagattggcgacgtgcgcggactgggcgccatgatcgccattgagttgttcgaaaatggcgaccccggcaaaccgaacgcggctctgaccgccgacattgtgacccgcgcccgcgagaaagggttaattctgctctcctgcggtccttactacaacatcttgcgcatcctcgttccactcactattgaggcctcgcagattcggcaaggcctggagattatcgcccagtgctttgatgaggcgaaacaagcgtaatgtccaataagcagcgtcgggtggcgacgtaactgtcttatccggcctacaaaaaccgtttcgattgtaggccgaataagccaggcgccatccggtaaacgagcgcaataacaataaagaggttttaggatggggcaattgtcagaatcacatgcattagggggcgggctgaaatcacgccacgtcaccatgttatcgatcgccggcgtcatcggcgccagcctgtttgtcggttccagcgtggcgattgcggaggccggccctgcggtactgctggcctatctgttcgcaggacttttagtcgtcatgattatgcgaatgctggctgaaatggccgtcgccacaccggataccggatctttttccacctatgcggataaagcgatcggcccctgggccgggtataccatcggctggttatactggtggttttgggtgctggttattccgctggaggccaatattgccgccattattctgaattcatggataccgggtattccggtatggctattttcattagtgattacgcttgccttaaccggaagcaatttattgagcgtcaaaaattacggcgagttcgaattctggctggcgctatgtaaagtaattgccattctggcgtttatcgcgctgggcgcgacggcgattagcggtttttatccgtatgctgaggtaagcggtatctcccggctctgggatcacggcggttttatgcctaacggcttcggcgcggtgttaagcgccatgttgatcaccatgttctcttttatgggcgcggaaatcgttactattgctgccgcggaatccgatacgccggataaacatatcgtacgcgccaccaattctgttatctggcgaatttccatcttttacctgtgttccatttttgtggtggtggcgctgatcccgtggaatatgccgggtctgaaaagcgtaggttcgtaccgttcggtactggagctgcttcatattccgcacgcaaaattcattatggactgcgtgattttattgtcggtgaccagttgtctgaactccgcattatataccgcctcccggatgctctattcccttagccgccgcggcgatgctcctgcgataatgggaaaaactaaccgtagcaaaacgccctgggtagcggttctcctctctaccggcgcggcctttttaaccgttatcgtcaattattacgccccggcaaaagtgtttaaatttcttatcgacagttccggcgccatcgcgctgctggtctatctggtgattgcgatttcgcaattgcgaatgcgtaaaattctgctggcgcagggcggagaaattaagctgaaaatgtggctttatccgtggctcacctggctggttatcggctttatctgctttgtcctggtggtgatgctatttcgaccggcacagcaactagaagtcatttcaacggggctgttagggctgggcataataggtactgtccccattatgtctcgctggaaaaaactgataaggtggcaaaaagcccccctgcaaaacctacgttagttattcccggcgtcagccgggaagcttctcaggagtaaaagatgaccgccctttcccaaccgacggccatagatggctatcgctggcttaaaaatgacattattcgcggcacttatcagccggatgagaaactgcggatgagtttattaaccgcccgctatgcgctcggcgtagggccgctgcgtgaggcgctgtcgcaactggtggcggaacggctggtcaccgtggtgaatcaaaaaggctatcgcgtggcatccatgtcagaggcggaactcctcgatatttttgacgcgcgcgccaatatggaagcgatgctggtacgcctggcgattgaacgcggcgatgatgcgtgggaggcggagatcctggcgcgagcgcatatgctcagcaaactggaagccagcgatgccagtgaacatatgctcgatgaatgggatcagcgccaccaggcgttccattccgccattgtcgccgggtgcggctcccactatctgctacagatgcgcgaacgcttatttgacctggcggcccgctaccgctttatttggttacgtgaaaccgttctgtccgtcgagatgctggaagataaacatatccagcatcacacgctaaccgaagcgatactggcgcgcgaggcggcacgcgccagcgaattaatgcgtcagcatttgctgacgccgattcccattattcgccaggcgatggcagggaaaatgtagcctggcgcgacctgatagccattattcttcaggaatacgcaacacttgtcccggatatattttttccgggcttttcagcatcggtttatttgcctcgaaaattttattatacagattggcgttaccatacacttgctttgaaatagcgctcagggtgtcgcctgattttacggtataaaactgactttcagccgccggcgtcgtggttttaacctgatcgtcaacgctgctaatcccggcgatattccccacggcaaccagaattttttcttttgcctcctgactcagcccatcacccgtcactgtcgcttttccatcagctatttgcacattcactttgtcagcgtcgggtattcccgttttatttaaatgttcctggacttttttcgcctgatcgtccttatcatgattagcggttaccgcgtcccagagtttttcacctgcatcttttacaaaattgaaaagtcccatattcacctcgcttgtcaaaaatacacacaaagaaaagtgtagcagagggaatgaggttatcctgataagcggcgcttatgcgccgccggtggccggtaattaatgacgcatctgaacccaaaatgcgtggataagccccggaatatatccgagtaatgtcagcaggatattaaggataaatgcccaaccgaacccttttcctaaaagtacgccgagcggaggcaaaataatcgtaaatacaattctccagaaacccatatacactccatacaagcaaaattagtcattgtttaaaaagagattttatctctaagcatagtcagtttacctgagcctgccagtcgcgcgccgcgcttttaccctcctttacgctctttacgctggcattaggttgatgtttattttagaattaactaaatttagaaaatacttaaataactatgacagagcttgaacaacttcaggccagcgcagaacaggcggcggccctgctcaaagcgatgagccacccaaaaagattactgattttatgtatgctttgcggttcgccaaaaaccagcgcaggcgaactggcgcgcattaccgggctaagcccctccgcgacgtcgcaacatctggcgcggatgcgggaagaagggctgattgatagtcaacgcgatgcccagcgcattcactatttcattaaaaatgaggcggttaatacgattatcgccacgttaaagaatctctattgtccataaggaggcacgatgtccattgggatagtttcccccgtgaggcgcaagcgctgatagcgcaaggcgcgaaactgattgatgtgcgcgacgccgatgaatatctgcgcgagcatattccacatgcgcaactggcgccgctctcccggcttgaacagggcgatttgcccgccaacctgcgagcggaacagattatttttcactgtcagtcaggtaaacgaaccagcagcaatgcagcaaaactacaggccattgccgcccctgctcaggtcagtctactggaaggcggtatcgacggatggaaagcggcaggattgcccgtcacagaagacaaatcgcaaccgttgccgctgatgcgtcaggtgcaaatcgccgccggcgggttggcgttgcttggggttattatgggctatacggtccacggcggctttttcctcattagcggttttgtcggggccgggttaatgctggcaggcatgaccggcttctgcggaatggcgcgactactggaaaaaatgccctggaatacccgtactcattaagcggtaccttcaccacgcgtcggtaagtgtgtagtagactgaaggcgggtttataccattgttcaacaggagggcgtgatgttcacaccaggcgatatcgtacagccccgaatgggtgggccgaaactgaaagtgattgaagtcaacgaggatcatattgtcgcggtacaggtcggtaatgaaccgggcgaaaaattgatcctcaaagcggcagatgtcaccccctattgcgaagagggcgattttggcgtgtgctgatttatcaaaatgagcatggcgcaacgttccctgagtcccggttaatagagacaggaaacgaagcgccatctgttaaaagctatccgtgattagattaagaaatcatccagagatttccccgccgccagcgcctgggcaatcggtttaggcgtacgaccttgtccggtccaggttttttcttcgccattgaaatcagtaaaacgatattttgccggacgcggctggcgctttttagcagaacgcggcattgctgaatccatggcaaataactcttccgggttaataccgtctgctttcatcagctccagaaaggcattaattttctcctgcttctcggcaagctggcgttgctgcaattcttcttcttcgcgtctttctttagtgacaaccctgaatttttcgagcatttcttcaagaacgtcaatggagaattcgcgagccatagcgcgcagcgtgcggatattatttaagttctgtaacatcaaattcatatcaataaaaaccttttaacgcagaaaacaaaaaactattacaggcggtattgtatgcgattgttgattatatttccagatcctaaagttcatacagatatacacagcataactcgattaattatattaatctgttaaccagaaggttatattcattaccccctgcgtgtttcaggttattctgcctacggtatatctgtaggtttcccgtttggctgtttatagcgtattgcgtatctcagtaaccgcggtgaccctcacggtggctgaccttatacagaagtgaatatttcagcacaataagagattaaccattcaaaaatcatcatcagagctttatgctaaaaatcagtctgcaatggctataattatgctgagaaaagtagagcgcgtgccgttagccgagaatacatcgcatctgacaacatttggaatgtggctgaaaatcgccagaaaaacaatgcattataatgcattgatttaaaagtaattaatgactaacaacaacgaaaatctcgccgcgagcaaaaaacacacaatcacagagtattttatcgacaaaaagcctataaataaaaatattacactagttgatagttattatatagggatatactctatgcaaagacaaaagtgctttatgatttcactaccaaccatcacctcattctgatcgatacgctacaaggagcattaacatgttctctccacagtcacgcttgcgtcatgccgtagcagacacgtttgcgatggttgtttactgttctgttgtgaacatgttgatcgagatattcctctccggaatgagctttgagcagtcgctttcttccaggctggtggcgatacctgtcaacattttgattgcatggccatacggcgtttaccgcgatctgattatgcgcgtcgcgcgtaaggcaagcccggcgggatgggccaaaaacctggcggatgtattggcttatgtcacctttcagtcacccgtttatattatcatcttgctgaccgtcggtgccggctggcatcagatagtggccgccgtgagttcaaacattgttgtttcaatgttaatgggcgcggtttatggctacttcctggattattgtcgccgcctgtttaaagtgagcagctatcatcaggctaaggcgtaagttagcgtcgcgactggcattgccagtcgcgcttttagtcggttttttcgtcgccaaaaagcccattcagataacgttctaacgctattcgggagctaaagccgtggggaataccgtaatgttcgtgggtctcgccgcctaaatagagcggaaagttttggtaatgatcgcaggttttaatatccgaagccgggtcagccagtgatgagctacggtcttttaatctggggtgaatgatcagcgcggtacgccccatacgcgcctcgcggttaacataaacataattctcgccgcgtcgataaccatacgtcttattcgtcaccacatcgacggtaaaccctgccttttccagtacccgcgccacctcgtcaggtcgtaaatacatattttatcctcattctcttgtactgcgggcttaccttacccgatagcgcgttatcaacgctttcagaaaagtccagaaacgcatgatatcgccgtaacaagcctcagcaggtaaaaatatgaactacactgaaagctacatcgaaatcaatggaggatcatatgcttaacaaaccgaaccgaaacgacgtcgatgatggtgttcaggatattcagaatgatgtcaatcgattagccgacagtctggaagatgtccttaaatcctggggaagcgatgcgaaagacgaagccgaggctgcgcgacgtaaagcacaggcgttgctgaaagagacccgggcgcggatgcagggtcgtactcgcgtaaaacaagccgcctgtgatgcgatggggtgcgcggatacgtttgtgcgtgaaaaaccctggtgtagcgtaggaaccgccgcagcggtggggatttttatcggggcgctgcttagcctgcgtcgctaacgacgtgcgctgccggatggcgacatactttatggggcctgcatcattgccgcaggcccaggtcgcgccattcggcgaaacggttactgtatcgcctgtcgaagctgacatgcgacctgtttcgccatgccagcggaagtaatattggtaaacgacagtaaaatgcccccctttcctgacgaaaccactcgccaacggcttagcgcctgtaccgccagtccggcctgattcgcttttgctacctgcgctttatcatcaccttcaacctcaataaccaattgaataccgcctttctgtaatgtcacgacaaatccctgttctgccagcgcctcttcaatccataaccgtcgctgagcataatgttgacgcatctttttcagatgccgccagaaatggccatcacggataaaatcagccagcgtgtgctgccataacaacggtacgctacagggcatcagcgacgcctgctggcggaaatgctcaatctgctttatcggcaccaccagccaggcggtacgtaatgccggaaagagcgacttactgaacgttccggcgtaaatcactcgctgcggggcatccagactcttgagcggcggaagtggtttaccgtgataacgaaattcgctgtcgtaatcatcttcaataatccaggcctgcacattcgccgcccatgccagaagttgccgtcggcgagttaacgacagcgccacccccaacggactttggtgggcgggcgtcaccaatgcaaagcgcccctgcgggcaatcccgcatccccgccgcgacattcagcccatcggcatcgaccggaatcggcgccagcgtaatcccctcctgcgttatcaccgggcgaattaacggaaagccgggatcttccacccacatgctgtctcccggcacagacaatgtacgcaggattagccgcatagaatccgcataaccggaggtaataaatacctgttccggcagacattcaatgctacgcgaaacccgcaggtaatcgactatcgcctggcgcaaaatcgcctcgccgcagacgtcgcctaatgccagatcgaagcatgtctgcgtgcgcaaccgacgccccattactcgcgcccacttctcgcgtggaaagagatccagcgccggtaaccccatctgaaagggtttcggttccggactttctccggcaaaaacagcgggtatcggcggcgccgtctcaaaccgtagagcgttgctcacaaacgtgcctgcctggccacgtcgctccagccagccctgcgccaccagctcgccataggcattttccaccgtggcgcgagaaacgcccagttcctgcgcccacgtcctactggaaggcaaacgcgttccgggcgcgagttctccttgctcaatggccgtttttaactgacgagcgatgtgctgatagcgcggcatatggtctgctttttctgtaaaaatatggctctcttttacagaccattatagtgctacagtgctcgtcatcaacacgaggagaaacatgatgacaacgttacgccaaccctattatgaactgagcccggaggtttacagcgctctggtgcaggcgaaaaacgcgctggaaaagagcacgcttgaccccacgctgatggagctgatttacctacgtgtttcgcaaataaatggttgtgcattttgcctggagatgcacagtaaagcgctgcgtaaggctggcgtgaatcaagctaaattagatgcgctggcaggatggcgggtaagtcaccatttcagcgagcaagagtgcgcggcgttagcctgggcggaatcggtgacgcacattgctgaaacccacgccgaagataatatttacctgccgctgctcgatcatttcagcgcgcgtgaaatcagcgatctgaccttcgccatcggtttaatgaactgctttaaccgtctggcgatcggtatgcgaatgtgacgcattgttgccggatggcgctgatgtcagccaactctgttatgcgtgaacctgcaggccggatcgggcgttcacgccgccatccggcaaaaattagccatgcctcccctaccccgcggcgttcatcagcggcgttaaaatcaatcgaaaattcccatatcttgtatggttgaatcttaattcaactacatctagtatttcctgtatcaacacacgacaatccgacgcgtttcatcgcgccgttttctcattttaaatggaaatacgaatcatgagcattactatttacactcgcaataactgtgttcagtgccacgccacaaagcgggcgatggaaagccgtggatttgaatttgagatggtgaacgtcgatctggtgccggatgcagcggatacgctccgggcgcaaggatttcgtcaattaccggtggtgatggcgggcgatttgagctggtctggcttccgcccggacatgattaaccgtctgcacccgacaccccacgcggcaaacgcatgagcgcgctcgtctacttctccagcagctctgaaaatacgcaccgctttatgcagcgtctggggctgcctgccacgcgtattccgctcaatgagcgggagcgaattcaggtagacgaaccgtacattctggttgtgccgtcatacggcggcggcgggatggccggtgcggtgccgcgacaggtgatccgctttttaaatgatgaacacaaccgggcgcgcattcgcggcgttatcgcctccggtaatcgcaatttcggcgatgcctggggatgcgctggcgatgtgatagcacaaaaatgcggcgtcccctggctgtaccactttgagctcatgggcacacaacgcgacatcgataatgtccgaaaaggagtaaatgaattttggcaacaactaccccggagcgcgtaatgcaggaaaccatggattaccacgccctgaacgcgatgctgaatctttacgataaagcaggccatattcagttcgacaaggaccagcaggcgatcgacgccttctttgccacccacgtccgcccgcattccgtgacgtttgccagccagcatgaacgtctggggacgctggttcgggaagggtattacgatgacgccgtcctcgcgcgttacgaccgcgccttcgtccttcgcctgttcgagcacgcccatgccagcggctttcgcttccagacgtttcttggcgcctggaagttctataccagttacacgctgaaaaccttcgacggcaaacgttatctggaacactttgaagatcgggtgacaatggtggcgttgacgctggcgcagggtgacgaaacgctggccacccaactgaccgatgaaatgctttctggtcgctttcagcccgctaccccgacttttttaaattgcggcaaacagcagcgtggggaactggtctcctgcttcctgctccgtatcgaagacaacatggagtcgatcgggcgggcggtgaattcggcgctgcaactctccaaacgcggcggcggcgtcgcgtttttactctccaatctgcgcgaggcgggcgcgccgatcaaacgcattgagaatcagtcttccggcgtgatcccggtgatgaaaatgctggaagacgcgttttcgtatgccaaccaacttggcgcgcgccagggggccggcgcggtttatctccatgcgcaccatccggatattctgcgttttctggataccaaacgagaaaacgctgacgaaaaaatccggatcaaaacgctctctctcggcgtggtgatcccggatatcaccttccggctggcgaaagaaaacgcgcaaatggcgctcttttcgccctatgacatacaacgacgctacggcaaaccgtttggcgatatcgccattagcgaacggtacgatgaattaattgccgatccgcacgtgcgcaaaacctatattaacgcccgtgacttttttcaaacactggcggagattcagttcgaatccgggtatccctacatcatgtttgaagatacggtaaaccgcgcgaatcccattgctggtcgcattaatatgagcaacctgtgctcagaaattttacaggtcaatagcgcttcccgttacgacgataaccttgactatacccacatcgggcatgacatctcctgcaatctcggctcgctgaatatcgctcacgtcatggattcaccggacattggccgtaccgtagaaaccgctattcgcggcctgacggcggtgtcggacatgagccatatacgcagcgtgccctcaatagccgccggtaatgccgcctctcatgccatcggtctgggccagatgaatctgcatggctatctggcgagggaaggtattgcctacggttcgccggaggcgttggatttcaccaatctctatttttacaccattacctggcatgccgtgcatacttcaatgcggctagcccgcgaacgcggcaaaaccttcgccggatttgcgcagtcgcgctatgccagcggcgactattttacgcagtatttacaggacgactggcaaccgaaaacagcgaaagtcagggcgctatttgcccgcagcggcattacgctgcccacacgagaaatgtggctaaagctgcgcgacgatgtgatgcgctatggcatctataaccaaaatttgcaggcggtgccgccgaccggttcgatttcttacattaatcatgcgacctccagcattcatccgattgtggccaaaattgagattcgcaaagagggcaaaaccgggcgtgtgtattaccccgcgccgtttatgaccaatgaaaacctggacatgtatcaggatgcttacgatatcggtccggaaaaaattattgatacctatgccgaggccacgcgccacgtcgatcaagggctgtcgctcaccctgtttttccccgataccgccacgacccgcgatatcaacaaggcgcagatctatgcctggcgaaaaggtattaagtccctgtattacatccggcttcgccagttggcgctggaaggtactgaaattgaaggctgcgtatcctgcgcgctataaggaaagccatatgaaattatctcgtattagcgccatcaactggaacaagatccaggacgacaaagatctggaggtatggaaccggctgaccagtaacttctggctgccggaaaaagtgccgttatcgaatgatattccggcctggcagacgctgagcgccgccgaacagcagctcaccattcgcgtgtttacgggacttacgctgctcgacactatccagaacatcgcaggcgcgccgtcgttaatggcagatgccatcacgccgcatgaagaggcagtgctgtcgaacatcagctttatggaagcggtacacgcccgctcttacagttctattttctccacgctgtgccagacgaaagaggttgatgccgcctacgcctggagcgaagaaaacccaccgcttcagcgtaaggcgcagattattttagctcattacgtcagcgatgaaccgctaaagaaaaagattgccagcgtctttttagagtcttttctgttctattccggcttctggttgccgatgtatttctccagccgcggtaagctcacgaacactgccgacctgattcgtttaatcattcgcgatgaagcggttcacggttattatattggctataagtatcagatagcgctacaaaaactatcggcaatcgagcgtgaagagttaaagcttttcgcgctggatttgttgatggaactgtacgacaacgaaatccgctacacagaagcgttatatgcggaaaccggctgggttaacgacgtcaaagccttcttgtgctacaacgccaataaagccttaatgaacctgggttatgaggcgttatttccgccggagatggcagacgtgaatcccgcaatccttgccgcgctctcgccgaatgccgacgaaaaccatgatttcttttccggctcaggttcatcttatgtgatggggaaaacagtcgaaaccgaagacgaagactggaatttttaaccttacgggcatgggaaataacgttacatttcccatgcctttatttcaagcaatagggagtcaaatcgcgcaaatattacaacatgtcctacactcaatacgagtgacattattcacctggattcccccaattcaggtggatttttgctggttgttccaaaaaatatctcttcctccccattcgcgttcagcccttatatcatgggaaatcacagccgatagcacctcgcaatattcatgccagaagcaaattcagggttgtctcagattctgagtatgttagggtagaaaaaggtaactatttctatcaggtaacatatcgacataagtaaataacaggaatcattctattgcatggcaattaaattagaagtgaagaatctgtataaaatatttggagagcatccgcagcgtgccttcaaatatattgaaaagggactatcgaaagagcaaatactggaaaaaacggggctatcgcttggcgttaaagacgccagtctggccattgaagaaggcgagatatttgtcatcatgggattatccggctcgggtaaatccacaatggtacgccttctcaatcgcctgattgaacccacccgcggacaggtactgattgacggcgttgatattgccaaaatatcagacgctgagcttcgcgaggtgcgcaggaaaaagattgcgatggtcttccagtcatttgcgctcatgccgcatatgaccgtgctggataatacggcattcggtatggaattagcgggcatcgcggcgcaagagcgtcgcgaaaaagcgctggacgccttgcgtcaggtggggcttgagaattacgctcacgcctacccggatgaactttccggtgggatgcgtcagcgtgttgggcttgcccgcgcgctggcaatcaaccctgatatcttattaatggatgaagcgttttccgccctcgatccattaattcgtaccgaaatgcaggatgagctggtgaaattacaggcgaaacatcagcgcaccattgtctttatttcccacgatcttgatgaggctatgcgtattggcgacaggattgccattatgcaaaatggcgaggtcgtacaggttggtacgccggatgagatcctgaataatccggcaaatgattatgtccgcacgttcttccgtggcgtggatattagtcaggtctttagcgccaaagatattgcccgtcgcagcccggtcggattaattcgtaaaacgccaggtttcggtccccgttcggcactgaaattattacaggacgaagaccgtgaatatggttacgtcattgagcgtggcaataaattcgtgggcgtcgtgtccatcgactcattaaaagcggcattaagccaggcgcaagggattgaagcggcgcttatcgacgaccctttagtcgttgatgcgcaaaccccactcagcgagttgctctctcacgtcggccaggcgccctgcgcggtgccggttgtcgatgaagaacaccagtatgttggcattatttcaaaacgtatgttgctacaggctttagatcgcgaggggggtaacaatggctgatcaaacgaatccgtgggataccgcacaggtggccgatactacgacgcaaacggctgatgcctggggaacaccggcaggcgtagccacggacggcggcagtaccgactggttgaacagcgcgcccgcgccagcccctgaacacttttctcttctggacccgttccataagacgctgatcccgctggatagctgggtcacagagggaatcgactgggtcgtcacccatttccgtcccctttttcaggggattcgtgtgccggtggattacatcctcaacggctttcagcaactgctgctgggaatgcccgcccctgtggcgattattctctttgcgctgattgcctggcaggtttccggcgtgggcatggggatcgcgacgctgatatcgctgatcgccatcggcgcgatcggcgcctggtcgcaggcgatgattaccctggcgctggtattgaccgccctgttgttctgcgtcgtgatcggattaccgatgggaatctggctggcgcgcagcccgcgcgcagccaaaatagttcgtccgctgctggatgcgatgcagaccacgcccgcgtttgtctatctggtgccgattgtcatgttattcggcatcggtaacgtgccgggcgtggtggtgacgattatttttgctctaccgccgattgtacgcctgacgatcctgggcattaaccaggtgcctgccgacttaattgaagcgtcgcgctcgttcggcgccagcccgcgccaaatgttgttcaaagtgcaactaccgctggcgatgcccaccattatggcaggcgttaatcagacgctgatgctggctctctcgatggtcgtcatcgcctcgatgattgcggtcggcggacttggccagatggtactacgcggcattggtcgtcttgatatggggctggcaaccgtcggcggcgtcggcattgtgattcttgccatcattctggaccgtctgacgcaggccgtcgggcgcgactcgcgtagccgcggtaaccgtcgctggtataccaccggtcctgttgggctaatcacccgccctttcgttaagtaactctcctgacgcccggtgacattgcgcttaccgggcttacaactccctaccataattaaaggaacaacgatgcgacataccgtgatatttgcctcagcgtttgccacccttgtcaccgccagcgctttcgctgccgacctgcctggcaaaggcattaccgtccaacctatccaaagcacgatttctgaagagaccttccagacgttactggtcagtcgggcgctggaaaagttgggttataccgtaaataagccgagtgaagtcgattacaacgtaggctacacctccatcgcctctggcgatgcgacgtttaccgccgtgaactggcaaccgctgcatgatgatatgtatgccgcagcaggcggagacaacaagttttaccgcgagggcgtcttcgtctccggcgctgcgcagggctatctgatcgataaaaaaaccgccgagcagtacaacatcaccaatatcgctcagctaaaagatccgaaaatcgccaaaatcttcgatactaatggcgacggaaaagcggacatgatgggctgctcgccgggctggggctgcgaagccgtaatcaatcaccagaataaagcgtttgatttgcaaaaaaccgttgaggtcagccacggtaactatgcggcgatgatggctgataccattacccgttttaaagaaggcaagccggtgctgtattacacctggaccccgtactgggtgagcgatgtaatgaagccgggtaaagatgtcgtctggctacaggtgccgttctcctccctgccaggcgaacagaaaaatattgatactaaactgccgaacggcgcgaactatgggttcccggttaataccatgcatattgtcgccaataaggcatgggcggagaaaaatccggcggcggcgaaactgttcgccatcatgaagctgccgctggcggatatcaacgcgcagaacgccatgatgcatgccggtaaatcgtctgaagccgatgttcagggccacgtagacggctggatcaacgcccaccagcagcagtttgacggctgggtgaaagaagcgctggccgcgcagaaataagatcgttttttatgccggataaggcgcagttcatgcgccgctatccggccaacgcaatctctcctcaaagcgcacgattcatcacgtcaccgttcccctttattcatcaacatccgctatgattgttttcccaggaaataattatctgaatcacgattaccataatgacgaaacccactcatgagcttagcccggcgctgatcgttttaatgtctgtggccacgggtctggcggtcgccagcaactactatgcccagccgctgcttgataccatcgcgcatcacttttcgctttccgccagctccgcagggtttatcgttaccgccgcgcagttgggctatgccgctggcctgttgtttctggtgccgctcggcgacatgtttgaacgccgaacgctgattgtctccatgacgttgctggcggctggcggaatgctgatcaccgccagcagtcagtcgcttagcatgatgatactcggaacggccttaaccggactgttctccgtggtggcgcagattctggttccgctggccgccacacttgcgacgcccgccacccgcggtaaagtggtcggcaccattatgagcggcctgttgctggggatcctgctggcgcgaacggtcgccggactgctggcaaacctcggcggttggcgcaccgtattttgggtagcgtcggcgctgatggcgctgatggccgtcgcgttatggcgcggactgccaaagctcaaatccgacacccatcttaactacccgcaactgttgggttctgtattcagcctgtttattcacgataagctgctgcgtacccgcgcactgctgggctgtctgacctttgctaatttcagcatcctctggacatcaatggcctttttgctcgccgcgccgccgtttagctactccgaggggatgattggcctgtttggcctggcgggggccgccggcgctttaggcgcgcgtccggctggcggatttgccgataaaggtaaatctcacctcaccaccacgttcggcttactgctgctgttactctcctggctggctatctggcttgggcacacctcggtactggcgctgattattggcattctggtactggacctcaccgttcagggggtacatatcaccaatcagacggtcatctatcgtttgcatccggatgcgcgtaaccggctcaccgccggctatatgaccagctactttatcggtggcgccgcggggtcgctgatttccgcctccgcctggcaacatgccggctgggccggcgtttgtctggcgggtgtcacggtagccttacttaatttactggtctggtggcgaggttttcaccgacaggaagccgtaaattaagcggatagtgagcgtttacctttgtttaagctccttagggtgttaaggagctccccagtctgttaaggttatgctattcatttatcatggttatttttataccggtgaagaataatataattctatggaaagccctgcatccccatctgctcccaggccaatagcgcccgttcaaggattcgaaggtcgttcaccgatagctatccgtgatattccggtggcttttgcatcgggttgtaaggccgtttacccggctttcgcccctcccgcttatcgttctctcctgattttttcatgcaggcactcacgcttttctcgtcattcctggatttgccgcaggcggcgctttaccgggcccaatgttcccgctgacgtctcagtctgcgtatcattggttgctttatagcctgaaagaatgattttgtattaataatacatttactttatttgtcactgtcgttactatatcggctgaaattaatgaggtcatgcccaaatggatagttcgtttacgcccattgaacaaatgctaaaatttcgcgccagccgtcacgaagactttccttatcaggaaattcttttgactcgtctttgtatgcacatgcaaggcaagctcctggaaaaccgcaataagatgctgaaggctcaagggattaacgagacgttgtttatggcgttgattacgctggagtctcaggaaaaccacagtattcagccgtctgaattaagctgcgcgctgggttcatctcgcaccaatgcgacacgcattgcagatgagctggaaaaacgcggctggattgagcgtcgtgagagcgataacgaccgccgttgcctgcatctgcaattaacggagaaaggccaggcatttttgcaagaagtgcttccgcctcagcatcattgtctgcatcaactctggtcatcacttagcacagccgaaaaagatcaacttgagcacatcactcgtaaactcctgacgcgtcttgatcaaatggagcaggaaggcactgttcttgaggcgctgcgctaaagcgccgacccgctcaaaaatccagattaataacaggaaagcggacaggccggcacgcgttactgctggcctttctgacaacaggtcggctcagccgatgtgaataataagatcgtggagaacaacatgagcgcaaatgcggagatccaaaccccgcagcaaccggctaagaagaaaggcaaacgcaaaacagcgctgctacttcttaccttgctctttgttattattgccgtggcatatggaatttattggtttttagtattgcgtcatattgaagagacagatgatgcttacgtggcagggaaccaggttcaaatcatggcgcaggtgtcaggcagcgtgacgaaagtctgggctgataacaccgactttgtaaaagagggcgatgttctggtcacgctcgatcagactgacgccaaacaagcgtttgaaaaagccaaaacggcgctggcctccagtgtgcgccagacgcaccagttgatgattaacagcaagcagttgcaggcgaatatcgacgtgcaaaaaaccgccctggcgcaagcgcaaagcgaccttaaccgtcgtgtgccgctgggtaatgccaatcttattggccgggaagagctgcaacacgcccgcgatgccgtcgccagcgcgcaggcacagctggatgtcgccattcaacagtacaatgccaaccaggcaatgatactcaacagtaatctggaagatcagcccgcggttcaacaagcggcgaccgaagtgcgtaacgcctggctggcgctggagcgtactcgcatcgtcagcccaatgactggttatgtctcccgccgcgccgtccagcctggcgcgcaaatcagccccaccacgccgctgatggccgtggtgcctgcaaccgatctgtgggtggacgctaactttaaagaaacccaattagcgaatatgcgcattgggcagccagtgacggtgattactgatatttatggcgacgacgtaaaatacaccggtaaagtcgtcggtctggatatgggaacaggcagcgccttctccctgctgcccgcgcaaaatgcgacgggtaactggattaaagtggttcaacgtctgccggtacgcgtcgaactggacgcccgccagttagaacaacatccgctgcgtattggtttatcgacgctggtcaccgtggataccgctaatcgcgacggtcaggtactggccagccaggtacgaacgacgccggttgccgaaagtaacgcacgcgaaattaatctcgcgccggtcaataaactgatcgacgacatcgtacaggctaacgcgggttaatcctgaggtgcgtgtgatgcaacagcaaaaaccgctggagggcgcgcagctcgtcatcatgacgatcgcgctgtcgctggcgacattcatgcaggtgctggactccaccattgccaacgtggcgattccgaccatcgccgggaacctgggttcttccctaagccaggggacatgggttatcacctctttcggggtggcgaacgctatctcgattcccttaaccggctggctggcgaaacgttttggcgaagtcaaactgttcatgtggtcgacggtcgcctttgccgcggcctcctgggcctgtggcgtatccagcagcctgaatatgctgatcttcttccgcgtggtgcagggcgtggtcgccgggccgctgattccgctctcgcaaagcctgttgctgaataactatccgcctgcaaagcgctccattgcgctggcgctctggtcaatgaccgtcattgtcgcgccgatttgcggcccgattctggggggctacatcagtgataattaccactggggatggattttcttcatcaacgttccgattggcatcgccgtcgtcctgatgacgttacacacgctgcgcggacgtgaaacgcataccgaacggcgacgtattgacgccgtcgggctggcgctactggtgattggcatcggcagcctgcaaattatgctcgatcgcggtaaagagctggactggttctcctcgcaggaaattatcatcctgaccgtggtcgccgtcatcgccatcagtttcctgatcgtctgggaactgaccgacgatcaccctatcgtcgatctttctctttttaaatcgcgtaacttcacgattggctgcttgtgcatcagccttgcctatatgctctatttcggcgccattgttctattgccgcagcttttgcaagaggtgtacggctataccgcaacgtgggcaggtctggcgtcagcgccagtcggtattattccggtaattttgtcgccgattatcggacgcttcgcgcataaactggatatgcgcaggctggtcacgttcagcttcattatgtacgccgtctgtttttactggcgcgcctggacgttcgaaccgggtatggatttcggcgcttccgcatggccgcagtttattcagggatttgccgtcgcctgcttctttatgccgctgaccaccattacgctctccgggttaccgccagaacggctggcggcggcatcaagcctgtcgaacttcacgcgaacgctggcaggttccatcggcacctcgattaccaccactatgtggaccgatcgtgagtcgctacaccatgctcagctcaccgagtcggttacggcgtataatccaaacgctcagactatgtacgataaactggaaggcttagggatgacgcaccaacaggcgtcaggctggatagcccagcaaatcacgaatcaggggctgattatttccgccaacgaaatcttctggatgtcggcggggatcttcctggtgctgctcggcctggtgtggttcgccaaaccgcccttcggtgcgggcggcggcggtggcggcgcgcactaactatctgataaaagggatctgcggatcccttttttagtagaccaacaatcagaagaaatatttgaatctcagacgcccgccgtaacgcgcatcttcactgttatcgccattattcggattggcctctacccatgaagcataggcaccgaggtagatgttaaagtttttcatatccatcacgttggggaataaatatgaggcatgaatagtgtgaatgtcataattgccgggatcggtgacccagcaatcgtcctcacaaacggcatcgatattggtagcattaaaggcttcgattttgttatgcgcatagatataacccagttcaaatcgatgccacaacgcattcaccccggcggtaaaatctgtctcatcggtcgcgtccatataggcggtattcaggttaatcactgcgccatcttccgggtcagttttttgaccattccaggtcatggtaaaaccatagcccgtacgatctgactgatcgatccacttcccattctcataatagccataggcgttgttaacgacgttactttccatcgctatcgccgttgaaaaacgcccgttttgccaggcgataaccggacggacgtaagccacgtttttatcgttgcttaaatccattccgtggtactgcttctcggtatataacgtactgccattttccagcaatgtgttaacttcgaaataccagttgtcgatggttttactcagcaggaagttacccccgctgtcgctacgtccccgtccttctttcatcatatagatatagccgtaaccgtcactgtaaagatcgttcgctgtattccccgaatattcaataaacgtatcctgattcagcgggaacatatcgtaggcttcaaaacgaccaaccttaattttccagtcattctcacgaccaaagaagaaaacggcatcatcaaggttcatttttccggtcaggtccgccagaggctgtacagagaatccggcaaaattaccgttgtccagccgctggtagccatcaaagcccagcaacaggcgtccgttaatatcccagcgttcattggttcccggtgcccaatctttattcgctgacgttctcgtcgatgtcagactaccggaacggcttgccgcatccatattaaattcgacatcgccatagaacttaatatcgctgaatccggataaagtcagcttcggcggcgttttatctgctgcaatgggctcggcggactggacattcaccgtcggcgtagcggcgacctgctgctgtttcaacgagcgaatttgcgcctcggcatcggatgcccgtttttcagcattaacaacacgttgctccagttcagccagacgctgctcaatagtgatattattcgctgcccaaaggttatgagaaaagcaagcaccgatcatcagcgctaaatatttagccttcattttttatcccttaagtttgatgtataccagataagatttgctaaaaaccccatcgaccggctattagtagagtcttgttattacctggatatctggcgcattccattatgtttttctattaattatttatgatttttagtttatgtgatcaatacactctggcatcgtgagttatccgccttttctgtttaccagatcacattttattatttaacaggccaggcattacttaatttaaaatgtattctcgccgcaaatataataaacgcaaattatattaagcaataaaaaaccccggccataaaccggggttaatttaaatactggaaccgcttacaaataagactaaatatgcagttcctgcagtttttctttcggcagcgccagctctttattgctgttcacgcgcacatcacgctccagaatatgacgggcaatgtcctgcgcttcactgagcgagtgcatctgatacgtaccgcactggtaaacgttcagctccgggatctggttttgatcctgcactttcagcacatccgccatcgccgctttccaggcgtcggcaacacgctgctcgtccggcgtgccaatcaggctcatgtaaaagccggtgcggcagcccatcggcgagatatcgataatctcaacgccgttaccgttgaggtggtcgcgcataaagccagcaaacagatgctcaagcgtatgaatccctttttccggcatcacttctttgttcggaatgcaaaaacgcagatcaaacacggtgattgcgtcgccatgcggggtgttcatcgtttttgcaacccggaccgccggcgcttgcatccgggtatgatcgactgcgaagctatctaataatggcatttagtcacctccgataattttttaaaaataaactgaactctttgttccggggcgagtctgagtatatgaaagacgcgcatttgttatcatcatccctgttttcagcgatgaaattttggccactccgtgagtggcctttttcttttgggtcaggcgtgttttgcaagccacgcggcaaacggctcggtatccgccgcctcaatctcctgctgacgacgtactgaagcgtcacgttcagcaataaactcttcttcctgtaaaatctccagcggctcttcgcgtaacagattacggtaagcctcaccgaacgctttcccggtgccgccaatgccttcatcaatcatagaccgtaggatccgggcggagaatgtcagttcaggattatcaaagcaggcgaccaactcgtcacacaccttttgatactcctctcccccgtggatactgtccagcgtttgcgccacgcgtttcagatcgcggaaaagatctttcccgactttgggcagcgggaactgcgcagtttcacagccaatgcctaacgtcaggcccggcttacgcccttccagaataacgcgattccagttagtacgcgtacataacagctcatcgctactcatttccggcgcatcggccaatacgcaccagaccataaacagatcgaggaagcgcacctgttgctcgtctacgccgatcggtgagaacggattaatatcgagagaacgaacttcaatatactcaataccaccacgcagaagcgcgtcagaaggcgattcgccgctgcgcgtcacgcgcttgggacgaatgggcgcgtacagctcattttcaatttgcagaacgttgctgttaatctgtagccgcttaccgtctttttccacaccaatccgtgcgtactcctcggaaggggttttaatcgcgcgcttcagacctgcaacgtattcatgcaaatcgttaaacgtaattccgagattgctttgcgacttattggtatagcccaaatcactcaaacgcagcgacgtcgcatacggcaggtagtacatgccgcagtccgttttttcaaacggtaatgtggttggctttccttgcaggaaagaggaacaaatggccggagacgcgccaaacagataggggatgacccagccaaaacggtaatagttgcgaatcagacgaaaatagccggcagaaattttttcttttgccgcttcgccttccgtaacgccgcatttcgcctgccagaacgccatcggtaatgaaaaattgtaatgtacgccggagatggtttgcatcaaagcgccataacgatttttcagcccttcgcgatagagcgtcttaaaacgcccggtattggatgtgccgtactgcgccagctctatgtcctgcccttccgcaatatagcagggcatacttaatggccacatccgctcatcgcccagtttcctggccgtataccgatggagatcgcgcataaaggtgagcatatgctggatatcgccatcgactggcgtaataaactccagtagggcttccgcaaaatctgtggtaatccatttatgggtcagcgctgaacctaacgcttcaggatgacctgttgtcgccagcgtgccatcagcattgacacgcagcgtttcgcgctctaacccgcgctgtatcccctttaacgcctgaggatgtttttccagccaggccagagcctgtgatacgtccgggatcaaattgacctcccgcctgtccaaatcgttttaataagcataactgtaatggcggccatacatgccaaacctacaattattaccaccacatcatgccctgaaccgtcgccgctgcgagcgcaacatagcgcagcgccttaccaagacacaaaaaaaagatcgtccgcccccacgggatgcgcatccatcccgctaacaggcacaacaaatcaccgatgaccggcatccagcttaataatagtgtggctgcgccataacgctttagccagccagtcgctttttcctgccaacgcgacgttttgcgcagcggaaagaaacgcccaagaataacgttagttacccctccaaggctattacccattgttgctgttaagactaagacccagggatggctgacgccggagaccagcatagcaaccaaaaccacctcagaattaccgggtaacagcgtcgcgctgagaaaactactggcaaacagagacaggagcgacagtccgtcactcacaatagtcggacatccacggcatccattcccgccgcccgcgccgcctgtaaaccaaaatcggcatcttcaaataccacgcactgcgtcggcatgacgcccatccgctgggcgcacagtaggaaggtgtcaggcgcaggtttgtgatgctgtacgtgatctgccgccacaaccgcatcaaaataacgacgcagccccagatgcgctaacagggcttccgcgatagcgctttcgctaccggtaccgaccgacatgggacgccgcccatgccacgctttaaccacctcaaccagcggcagcggttctacgcagtccagcaggatgctttttaccgcgtcggttttctcacgcgccagtgacaggggatcaagatcggcatggttaagctcaatgattgactgggcgataagccaggttggcgaaccgttaagcgcgaccattgcctgttcatcaaaacgaagaccatagcgccccaaaacctcacgccacgctttgcgatgcgtgggttcggtatccaggagagtaccgtccatatcaaaaatcaaaccagcataacgtgcgtacatcgtgttctcgcaaaccgaataaccagacagtactttatcgcaattggttgattttgtcgctaatagagatgaagaggtatattcaggataagggggaaaagcgattgcagggcagtaacgtatccgggaggattactcgcccttcgggccgttgctgatgcaacgttatccttctgatgccagcggtgattaccgctatcttatctgcatcttcatcgctgaaagtatggagaatatggtgcatccgggaggattactcgccttacggctcgcccttcgggccgttgctgacgcaacgttatccttcctggtgccagcggtgattataactatcttatctgcatcttcatcgctgaaagtacggagaatatggtgcatccgggaggattcgaacctccgaccgctcggttcgtagccgagtactctatccagctgagctacggatgcattggaaatgatgtttactacaagatttgatgtcgcatttactgccacactaaataagatggtgcatccgggaggattactcgccttacggctcgcccttcgggccgttgctgacgcaacgttatccttcctggtgccagcggtgattaccgctatcttatccgtatcttcatcactgaaagtacggagaatatggtgcatccgggaggattcgaacctccgaccgctcggttcgtagccgagtactctatccagctgagctacggatgcatcggaaaacttgctttactgccgatattgataccgcggtgaaagccgtatcaagtaagagatggtgcatccgggaggattcgaacctccgaccgctcggttcgtagccgagtactctatccagctgagctacggatgcatcgggaaacttactttactgcagattttgataccgcggtgaaagccgtatcaggtaagagatggtgcatccgggaggattcgaacctccgaccgctcggttcgtagccgagtactctatccagctgagctacggatgcaaatggcggtgaggcggggattcgaaccccggatgcagcttttgaccgcatactcccttagcaggggagcgccttcagcctctcggccacctcaccacacgcctcttacgagtgcttcgaagaacttgttctgctcatcgtcgctgcgtggcgcacatattactttctgggacttataagtcaaacaatttttccagagcttttatcgtttgcacacttcacgctcaattagtctgtaaaaaagccaaaaagagtgttttatcaacagataatttgatgacacgctggccgccaaaagcgcaccatatcaacagtgaggttgaaaaaagtcatgaagggacaacgcgggcgagcgagaagagaggctgcgtctcacccgaaaagtgagacgcgaaaaccttagtaactggactgctgggatttttcagcctggatacgctggtagatctcttcacgatggacagaaacttctttcggggcgttcacgccaatacgcacctggttgcccttcacccctaaaactgtcacggtgacctcatcgccaatcatgagggtctcaccaactcgacgagtcagaatcagcattctttgctccttgaaagattaaaagagtcgggtctctctgtatcccggcattatccatcatataacgccaaaaagtaagcgatgacaaacaccttaggtgtaagcagtcatggcattacattctgttaaacctaagtttagccgatatacaaaacttcaacctgactttatcgttgtcgatagcgttgacgtaaacgccgcagcacgggctgcggcgccaacgaacgcttataattattgcaattttgcgctgacccagccttgtacactggctaacgctgcaggcagagctgccgcatccgtaccaccggcttgcgccatgtccggacgaccgccacccttaccgcccacctgctgagcgaccatcccaatcaattcccctgctttaacccggtcggtcacatccttcgacacgcccgcaatcagagaaaccttaccttcaacaaccgttgccagtacgataacggtagaccccagttgatttttcagatcatcaaccatggttcgcagcattttcggctcaataccagcaagctcgctaaccaggagcttcacgccgttgagatcgaccgctttactggaaagatttgcactctcctgcgctgcggcctggtccttcaactgctgcaactctttttccagctgacgtgtacgttccagcacggcacgcactttgtcgcccagattctggctgtcgcccttcagcagatgcgcaatatcgtttaagcgatcgctttgcgcatgaacggtggccatagcgccttcaccggttaccgcctcaatacgacgaatgcccgctgcggtgccggactcagagataatacggaatagaccgatatcaccggtacgactggcgtgagtaccgccgcacagttcagtagagaaatcgcccatgctcagaacgcgtacacgttcgtcatatttctcgccaaacagcgccatggcccctttcgccttcgccgcgtcgagatccatgatgttcgtttcaatcggcaggttgcggcgaatttgcgcattcaccaaatcttcaacctcacgaatctccgacggcttcatcgcttcattgtgcgagaagtcgaagcgcagcactttatcgctaaccagcgaacctttctgcgcaacgtgtgtcccaagcacctggcgcaacgccgcgtgcatcaggtgcgtggcggagtggttcagacggatacgtgcgcggcgcgcttcatctacgtcagcctgtaccgcatcgcccactttcagagcgcccgcagacaatttgccgaggtgaccaatcgcctgaccatatttttgcgtgtcgtccacagcgaaagtaaatccagcgcctttcagctcgcctttatcgccaacctgaccgcctgattccgcatagaatggggtctgatccagcacgacaaccgcttcctgtcccgcgttaatcgcttcaaccgctttaccatcgacaaacagcgcagtcactttgccgttcagttccagatggtcataacctttaaattcagaagcgctatcaacgcggatcatcgcgttgtagtccgcgccaaaaccgctagcttcgcgcgcgcgacggcgttgctcttccatagcggcttcaaaaccggcttcatcgactttgatgttgcgctcacggcagacgtccgccgttagatcgaccgggaaaccataagtatcatacagacggaaagcggtttcgccgtccagggtgtcgccctgcaatttcgccagttcttcatccagcagcgccagaccgcgctccagcgtacgggcgaactgctcttcttccgttttcagaacctgttcgacctgcgcctgctgacgtttcaactcttcgcctgcggagcccattacctcaatcagcggcccaaccagcttgtagaagaaggtctctttcgcgcccagcatgttgccgtgacgaaccgcgcgacgaataatgcgacgcagcacatagccacggttttcattcgacggcagcacgccatcggcaaccaggaatgcgcaagaacggatgtggtcggcgataacgcgcagcgatttattacccagatcggtggcgccagtgactttcgctaccgcttcaatcaacgtgcggaacaggtcgatgtcatagttagagttaacgtgttgcagtaccgcggcaatacgctccagccccataccggtatctacagacggtttcggcaatggttccatcgtcccgtcagcctgacggttgaactgcataaagacgatgttccagatctcaatatagcgatcgccgtcttcttccgggcttcccggagggccgccccagatgtggtcgccatgatcgtagaagatttcggtgcacggaccgcagggaccggtgtcgcccatctgccagaagttatccgatgcgtatggcgcgcctttattgtcgccgatacggataatacgctcgcgcgggatgccgacttctttttcccagatctcataggcttcgtcgtcggtttcatagacggtgacccataaacgctcttttggcagagcaaaccagttttcaccggtcagtaattcccatgcgaactgaatggcgtcgtgtttgaagtaatcgccgaagctgaagttgcccagcatttcgaagaaagtatggtgacgtgcagtgtatccgacgttttccagatcgttgtgtttacctcccgcgcgtacgcaacgctgggaagtggttgcacgggaataattacgtttatcgagcccaaggaaaacatccttgaactggttcatcccggcattggtaaacaacagagtggggtcattgttaggcaccagggaactgctggcaactacctgatgccctttactatggaaaaagtcgagaaacgcctgacggatctcagcggtgctcttgctcataattatcctgaaatcaagctacacttcatccttcaggccgcctctgcgttggctgcgagtttcccggtcacgcgttcccgaggctcacttgccgctttgatgcggcttgaatgattttgtgtatttaaggaatattcgtcgcagacgctgttcgccgttaagcaacccgcgtccagacggaaaaagtgggaataagataagttttctttaccgggaagtaaaatcccgtatgcgctcaatctgcaaaatttcgccatatttgctggatattgtccatcagatacccgcgatagagcaaaaagcgctgtaccttaaccttttctgaaaagtttgaagggagcggctcgccatatttgcgaacggcctgttcacgtgccatttcactccagtcaatttcacattctcgcatcgctttttcagtcgattcacgggaaatgcctttctgattcaactcctggcgaatacgcgccgggccatagcctttgcggctacgactggcgataaagcgcatcacgaagcgctcgtcatcaagatagtgatgttcgtggcaccaggcgatcacgcgttcataatcgtctgccgtcgcatcaatctcttccggcccatttttgcccatcaccggcgcggagagtttacgccgtaattcctgctcgctgtgatcgcggacagcaagaatacgtaccgcacgatcaaggagacgagcataagcgggacggcgcgatgtgggttcactcataaaaaaccttaacagggagaaatgccaaaagggccgcataaatgcagcccttgatggtaatttaacgttttgctgaatggcggcttcgttttgcccgccccaccatcacctgatgattaaaaatcttcgttggtttctgcaacgccttcgctatcgtcaacggcgaaatcgggcgtggcattctgattactcaacagtaattcacgaacccttttctcgatctctttcgctgtcgccgggttctctttcagccaggtagtcgcgttcgctttaccctggccaatcttctcgccgttgtagctgtaccatgcgcccgctttctcgatcagcttctctttcacgcccaggtcaaccagttcgccatagaagttgatgccttcaccgtagaggatctggaactcggcctgcttaaacggcgcggcgattttgtttttcaccactttcacacgcgtttcgctacccacgacattatcgccctctttcaccgcgccaatacgacggatatcaagacgaacagaggcgtagaatttcagcgcgttaccgccggtggtggtttccgggttaccgaacatcacgccaatcttcatacggatctggttgatgaaaatcaacagcgtgttggactgtttcaggttccccgccagcttacgcatcgcctggctcatcatacgcgccgcgaggcccatgtgagagtcgccgatttcgccttcgatttccgctttcggcgttagcgccgctacggagtcgaccacaatgacgtccaccgcgcctgaacgcgccagcgcgtcacagatttccagcgcctgctcgccggtatccggctgagagcagagcaggttatcgatatcgacgcccagcttgcgtgcgtaaacagggtcaagcgcgtgttccgcatcgataaacgcacaggttttaccttcacgctgcgcagcggcaatcacctgcagcgtcagggtcgttttaccggaagattccggcccgtaaatttcgacgatacgccccatcggcagaccgcccgcaccgagtgcgatgtccagtgaaagcgaaccggtggagatagtttccacatccatagaacggtcttcacccagacgcatgatggagcctttaccaaattgcttttcaatttggcccagtgctgccgccaacgctttctgtttgttttcgtcgatagccattattactcctgtcatgcaacttggtattgaaccggatagtgaattcgtactgttgaagcaattatactgtatgctcatacagtatcaagtgttttgtagaaattgttgccacagggtttgtagcgcgtatgtcgtcgcctgtcgacgcaccgattcacggtcgccgctgaagcattcccgacgcgtaatcccttctccactgacgctggcgaaagcaaaccacaccgtaccaaccggcttttcttcactgccgccatccggcccggcaatcccgctaatagcgacagcaaaatcggcgcgagcggccttcagcgccccgatcgccatttcgaccactacgggttcgctgaccgcgccatgctgcgccagagtctcttcacgcacgccaatcatctgcgctttggcttcattactataggtgacaaagccgcgttcaaaccaggcggaacttccggcgatgtcggtaatggctttcgccagccagccgccggtacaggactctgctgtcgttacggtcgccccgcgcgcttttaacgccagcccgacctgctcgctaagccgcatcagttcactgtcagtcatcatgacctctgtcagttagaaatcctgccgcacaagatagcactttctcaccagagatggggacgagctgtcgattttacgagtcggattccgaaaaaatgccagcaggttatttatgcagaatgaaagaggtagcacttgactaaatagcagtaccatgtcgctaaatttacacgtacggagagaaagcaaggatgtcactcaaaaaaacggaaagcacacagcacaaactgaaacaaacctgtcaactacggctgtggttaattgtgggtggagtatgttcattaggaatgggagtactgaatatattgtcgtcaggctattttgaaccgtatgacggcggtcaaattatcttaggcctgggatgtctgggatatagtctggcactatcaaagaagatatcccacttgcaggcagagaatcagcccaaaaagccataataatagcggagggggtgctcccctccctaagcgtaaattagcgcacccgcgccagcgctaccgcctggcccagttgccaaaccgccatcgcataatgcgtgctgtggttatatcgggtaattgtgtagaagttcggcaggccgtaccagtactggtatcccgtaccgatatccagacgcagcaggctggcttcctgatgattgcccaacgattgctgcggcgttaagcctgcggcggcaagctgagagatgctgtattttgttttgaaaccattcgccaacccaggcgcctgaccactcgccggcaccgcaaccatatcgcctttcacccaaccatgcgccttgaaatagttcgccacgctgccgatggcatctaccggatcccacaagttaatgtgcccatcaccattgaaatcgaccgcatattctttataggaagatggcataaactggccgtagcccatcgcgcccgcaaaggaacctttcagattgagcggatcgtcttgctcatcgcgcgccatgagcaggaaggtttccagctcgccggagaaatattccgcccggcgcggatagttaaatgacagcgtcgccagcgcgtccagaatccgcgttttccccatgatacgtccccagcgggtttccacgccgatgatgcccacgatgatctccggcggtacgccgtatacctgccaggcgcggttcagcgcgtcttcatactgattccagaacgcgacgccgttttgcacgttatccggcgtaataaattgtttgcggtagcgcaaccaggcgccatttggtccggcgggcggctgagtggtcggcgcttgtctgtccatcagacgcaggacgtaatccagtcttttagactgcgagaggatctcttgcaactgctgacggtcgaaaccgtgtttactgaccattttatcaatgaactgctgcgcattagggttgttggcgaagtcgccgcccatttgcatgacgttatgctgcggctcaagcagaaagccgccggaaggcgtgcccgtcgtcgcttgagtctcggaagattttggcgtgctgctacaggcagcaagcaatacgcaaagtggaagtaacgctacataacgacgcttgaacatgagacatccattaaacaaattcagccagggagaagtatggtaaagcatcccccgccgcacaaggaagcggcacaagagaataaatcacctttctcctcttttcagtttgtatacgctccctcactcccacaatctttcaatttaaaatatttttcttttattttgcgatcacaataacacttttaaatctttcaacatgattacaatgaacaggaaattagcaagaaaactaaaaaccctacaggagagaacaatgatcgaaaccattacacatggtgcggagtggttcatcgggttattccagaaaggcggagaggtgtttaccggtatggtgacaggtattcttccgctactgataagcctgctggttatcatgaatgcgctcatcaattttatcggccagcagcgtattgagcgttttgcccaacgttgtgccggaaatccgctatctcgttacctgcttttaccgtgtatcgggacatttgttttttgtaatccgatgaccctgagtttgggacgctttatgccggagaagtacaagccgagctattacgcggcggcctcctatagctgtcactccatgaacggtctgtttccgcatatcaatcccggcgaactgtttgtttatctggggatcgccagcggactcaccacgttagggcttcctctcggcccgctcgcggtgagctatctgctggtaggtctggtgacgaacttcttccgcggttgggtcaccgatctcaccaccgctatttttgagaaaaaaatggggattcaacttgagcagaaagttcatctgacaggagcggtatcatgacacgggttcgcattgagaaaggcgccggcggctggggcggcccgcttgaactggacgttacgccagacaaaaagatcgtctatatcacagccggtacgcgcccggcgatcgtcgacaaactggcgcaactaacaggctggcaagcggtggacggctttaaagaaggcgaaccgccggaagcggagatcggcgcggccattatcgactgcggcggtacgctgcgctgcggtatctatccgaaacgccggattccaaccattaatattcactcgacgggtaagtccggcccactggcgcagtatattgttgaggatatttatgtctccggcgtaaaagaagaaaacattactcttgtcggcgaaacgcctgccagtccccagcctgccaaaacgacattaggacgtgactacgacaccagcaaaaaaatcaccgagcagagcgacgggctgctggcaaaagtcggtatgggaatgggctccgccgtggcggtactgttccagtccggtcgcgacaccattgatacggtcctgaaaacaatcctgccgtttatggcgttcgtttcggcgctgatcggcatcattatggcctcaggtcttggcgactggatcgcccacggcctggcgccattagccagccatccactggggctggtgacgctggcattgatctgctcgttcccgctgctgtcgccctttctcggccctggcgcggttatcgctcaggtcattggcgtcctgatcggcgttcagataggcctgggcaatatccccccgcatctggcgcttcccgccctgttcgcgattaacgcgcaggcggcctgcgactttatcccggtcggcctgtcgctggcggaagcgaaacaagacaccgttcgcgtcggcgtaccttctgtgctggtcggacgcttcctgactggcgcgcccacggtacttatcgcctggtttgtttccggctttatctatcaataagaggttcagacatgagcgtgatttatcaaaccaccatcacccgtatcggccagagcgcgaaggaagcgctcggcgaacagatgctgattacgtttcgggaaggcgcgccggcggatatcgaagaattttgcttcatccattgtcatggcgaactgaccggcgcgctgcagcctggcgcgcggtgtgaattgggtcaacattgctatccggtcacggcggtcggcagcgtagccgagcaaaacctgcgtgaactggggcatatcactttgcgcttcgatggtctgcgtgaagcggaatttcccggcaccgtacacgttgcggggcctgtaccggacgatatcgcgccgggctgtattttgacgtttgtcgcttaaggagaaaaaacatgaatcaagttgccgttgtcattggcggaggccagaccctgggggcattcctttgccgtgggcttgcagaagaaggataccgcgtggcggtcgttgatattcaaagcgataaagccgcgaatgtcgcccaggaaattaacgccgattttggcgaaggtatggcgtacggttttggcgccgacgccaccagcgagcagagcgtgctggcgctttcccgcggcgtagacgagattttcgggcgcgtcgatctgctggtttacagcgcgggtatcgccaaagcggcgtttatcagcgatttccagttgggcgattttgaccgctcgctacaggtgaatctggtgggctatttcctctgcgcccgtgagttttcccgcctgatgatccgcgacggcattcaggggcgcattattcagattaactctaaatccggcaaagtgggcagtaaacacaactccggctacagcgcggcgaaattcggcggcgtggggttaacccagtctctggcgctggatctggcggaatacggcattaccgtacactcgttgatgctcggcaacctgttgaaatcgccgatgttccagtcactgctgccgcaatacgccactaaactgggcattaagcccgatgaggtggaacagtattacattgataaagtaccgctcaaacgcgggtgtgattatcaggatgtgctgaacatgctgttattttatgccagcccgaaagcgtcttattgcaccgggcagtcgatcaacgtaaccggcggtcaagtgatgttctgaccgtgaattgccggatggcgccgtaggccggataagacggttacgcgccatcaggcaaaacaacaggagcacattatggtttccactctgattaccgtcgccgttatcgcctggtgtgcgcagctggcgctgggcggctggcagatttcccgctttaatcgggctttcgataaacttagccaacaggggcgggtcggcgtcgggcgctccggcgggcgttttaagccccgggtggtggttgccgtggcgctggacgaacagcagcgggtgacggacactttattgatgaaaggccttacggtattcgccagaccggttaaaattgccgcaatgcaaggaaaacatttgcatgaattacagcctgatgtgatctttccccatgattcgctcgcgcagaatgcactatcattggcgcttaaactgaaacatgggtaatttcgttgtgaatgcgtatagcttgcgaaattatcattttgcaaccaataccctaaataattcgagttgcaggaaggcggcgacgcagcgaatcccaggagcgtacatcagtacgtgaccggggtgagcgaggaaagccaacgcacatgcagcgtgaagtatgacgggtaaatacataagtcagggtaatcacgcctatgaaacctcgtcagcgtcaggccgcgattctggagcacctgcaaaaacagggaaaatgctcggttgaagaactggcccagtactttgacacgacaggcaccactatccgtaaagatctggtcattctggaaaatgccggaaccgtcatccgcacctatggcggcgtggtgttgaataaagaagagtccgatccgcctattgatcacaaaacgcttatcaacacccacaaaaaagcgctgatagccgcagccgctgtgaaatatatccatgatggcgattccattattctggacgccggaagtaccgtgttacagatggtgccgttgctttcgcgttttagcaacatcacggtgatgaccaacagcctccatattgttaacgcgctatcggaactggacaacgaacaaactatcctgatgcccggcggcaccttccgtaaaaaatcggcgtcgtttcacggtcaactggcggaaaacgcctttgagcaattcagctttgataaacttttcatgggaactgacggtattgacctgaatgtcggtgtgaccacgttcaatgaggtttacaccgtcagtaacgcaatgtgcaatgcagcacgcgaggtgattctgatggcggactcctcaaaatttggtcgtaaaagccccaatgtggtgtgcagtctggaaaccgtcgacaaactgatcacggacgcggggatcgatccggcatttcgtcaggcgctggaagcaaaagggattgaagtaatcataaccggagaaagcaatgagtgatgcactactaaacgcgggccgtcagaccttaatgctggagctacaggaagccagccgtctgccggagcgtctgggcgatgattttgtccgcgccgccaatatcattattcactgtgaaggcaaagtgatcgtttccggtattggtaaatcaggtcatattggtaaaaaaatcgccgcgacgcttgccagtaccggtactcccgctttttttgttcatccggcggaagcactgcatggcgatctggggatgattgaaagccgcgacgtgatgttatttatctcctattccggcggcgcaaaagaactcgacctcatcatcccgcgtctggaagataaatccgtcgcgctgctggcgatgaccggtaaacttcactctccgctggggcgagcggcaaaagccgttctggatatttccgtcgagcgtgaagcctgcccgatgcatctggcgccgacatccagtaccgtcaatacgctgatgatgggcgatgcgctggcgatggcggtcatgcaggcgcgcggttttaacgaagaagatttcgcccgttcgcatccggctggcgcactgggcgcgcgtttgctcaataatgtgcatcacctgatgcgccagggcgatgcaataccgcaggtgatgcttgccaccagcgtgatggatgccatgctggaacttagccgtaccgggctggggctggtggcggtttgcgatgagcaacatgttgtgaaaggcgtctttaccgacggcgacctgcgtcgctggctggtgggcggcggcgcgctcaccacgccggtaagcgaagccatgacgcccaacggtattacgctccaggcgaaaagccgcgccattgacgccaaagagctcctgatgaaacgcaaaattaccgccgcgccagtggtcgatgaaaacggcaaactcaccggcgccattaacctgcaggatttctaccaggcggggattatctaatccttcagtcccagacgcttcgccagccgatgcaggttggcgacgtcggtttccagcgcccgcgcgctggccgcccagttatgattattttgcgccagcgcctggcgaatcatctctcgctggaagttctccgtcgattcgcgcaaattgcggcaagtcggcagcgccagaaagctttccgcaggcggcgcgggtaaaacgtcctctgacaaggcaaaatgctgtgcctccagtatcacctcatcccctgcccgggtcgctctcgccagtacaaccgcacggtgaatggcatgttccagctcccggacgttgcccggccagccatagttgagcaaatggcgacgtgcgccgggactcagtaccacgcgggacagccccagccgcagtcggcactgctcgcaaaaatagcccgccagcagcaccacatcatcgccgcgctcgcgcagcggcggcacaaagagcgggaaaacgctcaggcgatggaacagatcggcgcgaaaacgccctgccagcacctcttcacgcaggtcacggttggtcgccgccaacacccgcacgtccacgcgcaggctacgatcgtcgccgacgcgctgaatatcgccatactgcaacacgcgaagtagcttagcctgtagcgccagcgacagttcgccaatctcatccagaaacagcgtaccgttatccgccatttcgaacttaccgctacgattactgatagccccggtaaaagccccttttacatgaccaaacaactcgctctccgccacgctttccggcagcgcggcgcagttgagatagaccagcggattaaccgctctgggggagccctggtgaatagctttcgccaccagctctttaccggtccccgtttcaccgccgatcagcacgttaagatcggagcccgccacaatctcgatctcttttttcaactgcgtcatcgccggcgacaggccgatcatgtgcgtctcttttatcggttcaaacacgcctgacgaccccggcagcatgttctggctttccagttgttcaattaacagcgcattactcaatgccccggcggccagcgcggcgacaagccgtagttcttcatcgctaaatacctcgaactgctccggcgtcatagcatcaagggtcagcgcaccgatgaggttctgtccggcaaacagcggcagaccaacacaggcgtggactttcaggctttcctgtccgggaattaacccgtcatacggatcgggtaaatcgctatcagccggaaaacgcaccacgtcccccgcgcgggcgatggcttccaggcgcggatgcccttccagggtaaaacgtctgccgaggacgtcctgcgccaggccatcaatcgccagtggaataaattgtcgtgattcatagcgcagcagcgccgaggcgtcgcacgccagcacctgacgcagcgtagtaatcagccgctgaaaacgatcctgatgcccaatgccgcgttgtaactcaatggcgatgcccgccaatacctccacggaaaaactcatggttacctcattgtcattttgacaacctatagtgtcatattgacagcatcatttatagtctttttgactacatcaaaaatacaaaacaaatataactcaatacaaatcaataagatgaaaagttggcacactagctgcaataagcaaaacaactttttgtaaacgttgaatgaattgaggtggttatgtctattctggttaaaaataatattcattgggttggccagcgcgactgggaagtacgtgattttcacggcactgaatacaaaacgctgcgcggcagcagctataacagctatctcattcgtgaagaaaagaatgtgctgatcgataccgtcgatcataagtttagccgtgagtttgtgcaaaacctgcgcagtgaaatcgacctcgcggatatcgactacatcatcattaaccatgccgaagaagaccatgcaggcgcgctgaccgaactgatggcgcatatcccggacacgcctatctactgtaccgccaacgccattgactctatcaacggccatcaccatcacccggaatggaattttaaggtggtgaaaaccggcgatacgctggatatcggcaacggcaagcagttgatcttcgtggaaacgccgatgctgcactggccggacagcatgatgacctatatgaccggcgacgcggtgttattcagcaacgacgcctttggtcagcactactgcgacgagcgcctgttcaatgatgaagtggaccaaactgaactgtttgaacaatgccagcgctactacgccaatatcctgacgccgttcagccgtctggtaacgccaaaaattaccgaaatcctcggcttcaacctgccggtggatatgattgccacctcacacggcgtggtatggcgcgacaacccaacgcaaatcgtggaactgtatctgaaatgggcgacagattatcaggaagatcgtatcactattttctacgataccatgtcgaacaatactcgcatgatggcggatgccatcgcgcagggtatcaacgaagtggaccccaacgtggcggtcaaaatctttaacgtcgcccgcagcgataaaaatgaaatattgaccaacgtcttccgttcgaaaggcgtgctggtcggcacttctaccatgaacaacgtgatgatgccgaaaatcgctggtctggtggaagagatgaccggcctgcgctttcgcaacaaacgcgccagcgccttcggttctcatggctggagcggcggcgcggtggatcgactgtccacgcgcttacaggatgccggttttgaaatgtccctgagtctgaaagcgaaatggcgtccggatctggatgcgctggagttgtgccgtcagcacggtcgcgacatcgcgcgtcagtgggcgcttgctccgctgccggaaaccacacagcaaatcgcgccagtcgaagaaaccataacctgcaccgccgcagacctcggccccaaaatgcaatgcagcgtatgccagtggatttacgaccctgcgctgggcgagccgttgcaggatgtcgcgccgggtacgccgtggaacgacgtgccggataacttcctgtgcccggaatgttcattaggtaaagacgtgttcgacgtactggcgacggaggcaaaatgagtcgggggatcatcattattgggtcgggcttcgccgcccgtcagctcgtcaaaaatattcgtaaacaagatgcgcatgtgccgttaaccctgattgcggcggacagcatggatgagtacaacaagcccgatctcagccacgttatcagccagtcgcagcgcgccgatgatctcacccgccagttagcgggggaatttgctgaacagtttaatctgcgacggttcccgcatacctgggttgctgacattgatgccgatgcccatgtggtgaaaagtcaggataagcagtggcagtacgacaagctggtactggcgaccggagcgacagcctttgtgccgccgattgcaggacgtgagttaatgcttactttgaatagccagcaggagtaccgcgcctgtgagacacaactgcgcgacgcgcagcgagtgctgattgtcggcggcggtctcattggcagtgaattagcgatggatttctgccgcgccgggaaaacggtaacgctgatggataacgccgccagccttctcgcctcactgatgccaccggaagtgagcagtcgcttacagcatcacctgaccgatatgggggtgcatctgctgctgaaatcgcagttgcaaaaactggagaaaaccgaagccggtatccgcgctacgctggtaagccagcatagtattgaggtcgatgcggtgattgccgccaccggcttacgcccggaaaccgctctggcgcgccgcgccggagtagccgtcaaccgcggcgtctgcgtggatagctatctacagaccagtcacccggatatttatgcgatcggcgattgcgcggagatcaacggtcaggtgctgcccttcctgcaaccgatccagttaagcgcgatgtacctggcgaaaaatctgctcggcggcaacgcgccgctgaagctaccggcgatgctggtcaaagtcaaaacgccggaactgccgctgcatctggcgggagaaactcagcgccgcgatttgagctggcatattaccgcagaatctgacggtatgattgccaaaggcatgagcggagaaggccaactacgcgcctttgtggtgagtgaagaccgcatgaaagaggcctttgcactgctaaaaacgttgtcggtataagcctgtgatgccggatggcgccgcttcgcgtcttatccggcctacgagtgagcatctgtttacaggccggataaggcgcagccgccatccgtcgccctacacttcacttaacgctcgcgctgcggcaatcacgccctgtccaaacgacagcccgccgtcgcccgctggtaaccgctgcggaaataacaatttaaaatcagaaagataaaaggcaagacgcgcgcgaagtaagcggttgtgtatcaccccgccgctgaagaccagagtggttatcccccgcgccgtagcctgctggcgcattagcgtggcaaacccgcacgccagcgcatcatgaaaagcccaggcgcgttgcgcaggcgtggcctgccagttcaaccattgccgccagaaaacggcgacgtccagttgagcgccgttaagcggcatcgttaccggatgctcaacgttagcgcattgagaggccagcgcctccagcgcgcaggcggcctcgccctcatagctaagcgatgctggcgcgcagcgaagcgcggcagccaccgcgtcaaacaaccgcccgcaggaagaggccaacggggcattgacgccgcgctcaatggcgcgcgccaggacattccagttttgctgttgcagccccgctgtctccgggtaatcctgccagtccggcacaaagcgcaggcactgcgccaacagattacgccacggatgtttggcagccagatcgcctcccggcagcgccacggcgggtaaaccacctaaatgttcgcattcgcgataattgacccgcaaacattctccgccccatagcgcgccattctcacccatgccgataccgtctaccgtcagggcaatcacctctccgccgtccagcggccaaccatgctcggccaggcaagccgccgcatgggcatgatggtgtaacaccgtctctgtcggcagacgcatctcactggcccactgactggaaacatagcccggatgcgcatcacagacgatacgctctggcgtaaaatcgtagattgactggatcagacgcaatgcctcgcgccactgcgcctggataccgtcatcgctgagatcgcctaaatgttggctgacaaccgcctgtgcgccgcgtaccagacagaacgtgtttttcagatccgcgcccagacaaagtatcggcggcacatcgcgaaatccgggcggcaacgcaatcgcgtccggcacgtatccccgcgaacgacgcagcatttcgccgctgtcgcgtacgacagagtcgtccatgcgctgtacaatgtcgcgattgtgcaacagaaaaccatcggcaatatcgtgtaaatcgtccagcgcctgttcgttggtgatggcgggcggtttgccgctcaggttgccggatgtcatcaccagcgggtaattgagctcctgcaacaagaggtgttgcaatgggttggctggcagcatcacacccacctccgtaagtcctggcgcgatgccctcactcagcgaaggtacatactgcttatccaccagtacaatcggggccgctggcgtggtcagcagcgaacgcgccgcgctcggcagcgtttgcgccgtgggcaacatcaccgccaatggtttcgccggacgatgtttacgcgcccgcagcatcgccactgcgttagcgttgcgcgcatcgcaggccagatgaaaaccacccagccctttaacggcaataatgcctccggcgttcagttgggcgaccgccgcctgcaaagccgcctctttttccgctcgttcatgttggctccgccactcaagatgcggcccgcatgacggacaggcaacgggctgggcatgaaaacggcgatcgtacggatcgcggtattcgctgtcgcattccggacacaagggaaacgccgccatcaccgtaaatggccggtcatagggcatagcgcgaataatggtgaagcgtggtccgcagtgggtgcaattgatgaaaggataacggtagcgccgctcgcctggggtattcatctcggcaagacatgccgggcaggtcgccgcatccggcacgatttgcgtgttcatcgaaccgcctgcgctctgacgaatggtgaaatccgtcggcgcgcgctcccataccaacgacgcgtgttcaacgctgtcaatgcgcgccagcggcgggcaatcctgatagagcgcggcaataaattgcgacggctcttccagcagccgaacgacgacgccgtcgccgtcattacacacgtcgccgtgtaatcgcaactgctgcgccagctgccagacaaaaggacgaaaaccgacgccctgtactttgccccgaatgcgtagctgtacgccggaaggtgtgtctatcgccatcttattttcccgccatcatcgaacccggatgcctgatggcgcgacgcttatcaggcctacaaccgcacggaccgtagaccggataaggcattgatgccgccatccggcaatgctttgtggcgtattctacgcgcaatcgcagaaatcagaaaagcagcgatgccgttgaatccagcgccgcgcgacggcgtttttccgcgctcagctgttcaagcttattgcggtccacgcagattagggcgtgcgttgggcaagcggccatacaggccggaccggcttcacggtggtgacacagatcgcacttgttggcttcggctttttcggcacgcacgttcagccccgcgccgctattgcgaaccaccggacgtaccaccacttccatggcgccgtaaggacatgccactacgcaagttttacagccaatgcagcgttcctgcatcacatgaacaaagcctttgtcacggctgatggcgccattcgggcaaacgttggcgcacggcgcgtcttcacactggcgacacagcgttgccgtggaaacgttcacgcctttgatgacatggatacgaggtaaaaaggtttcaggggtcagcgatgcgcaatcctgattttcctgatgggatacgacgcaagccacttcacaggtacggcaaccaatgcacttactcgcgtctgcaatgatgaaacggttcatcaaattctccagcaataacagatgatgtgccgatatatacacgaatcgtgccaatttttatttcattgttatttaagaatattatttctattttcgtgagcatttacgtgtcatcgtcacaagtgtcgatgacacgtaatgtcgccagtggtggtcaagatttgcagtgatagccagccaactctgcaccgcaactggcatcaatcctgattaacgcctggcaatacgttaccgcgtattaaacagcgctgcgtaagggaaagatcgtccgtttgcggattccttccggcaataggtttgataattaatttacgaccaggatagtgattaaaacgggtcagcgccggataactcaaccggccaaaccagccgtgtacgcgctgccagcgggcgtccttcacctgatataaattggttatccagtagcctgagtcaaattgcatatccaacagttgcgtgcgcccattgccctgtaaatcaagcaaatcatcaacgccagtatcggtcgcggtataaaacccccacggttcaaagacgcaggggcggccattcttgagaaaggtgaaaatgatgtattgcgcgctcggcgccaggcccaacccaggattgcccaaccagataaccagatcctgaatgccgttacgatcgaggtcagcgcgataaaattgcgcattacccgccaaattaatcagccttccaaccgggacaacccacgaattaccggctctgtcttttccgctaatccgccattcgttatcttttttcggctccggcagtagcgtcacgccactgactccgacctggcgaaagtgccaggtctggtcgggcgatacagaataaggcagggtcaacagcggcttcagcgcacgcttttgcgcatattcaccgtcgctcatcggcaggtaaccgacaacaccggtggccagtgcgcgtgcggcgaggcagagaaatagcagtccgctccatacgataatcttcacgtccttcttacaacctttgccgtgtaacacaaattctccctaaatatgtgcgcattttacgcctccggcgcttccagcgcggcaaatccgccgtttccctgccagccttccaggcgctgatagacgatgtttaccgcgtccttaatcggttgagtcatcggataataaaacccgacgatatccggctggataccaacaaaaatcacctccccgacatcctctttcagctgatcgataaggtagttgagcggcatattgtgggtggtcatcataaacatttcggcgatatcatccggatcgatgatgcggatctcgcccggattaagtcccatatcggtggcgtcgacaatcaacagacgctgcgggcgcagttcgcgaatcgccacaatgtcgttttccggcgcgctgccgccatcgatgacaacccagttgcccttcggctgcgccgcgcacatttccgccagtaacgggcctgcgccgtcgtcgcccatcatgctgttgccgacacagagtaaaacgtcagtcacgaagcctcctcaccatcagatagatggcgctttcctgatgaatgtcatacagcatactgagcatcagtttgctccattcttgctgctgcggggtctgcgcggcgcgcgcctcatcaaacgcgcgcgccagcatttgaacatggttgaaatcgatgacgatctcgccatacttcggcacgccttccattttacgccgggcatcgctaccggcttccagggtggcgatccacgccagatactcatcccatgggcaggtgagtgcggcctccagacaatcgataacccccaggtggtgaccaatcgccaggctgtaatagacaacctgctgcgcctcggcaggcgtcgcatcgttctcatcaataaacttacggctcagttgactgaacaccacctgttcgctcatcggatacgcgcctcttcaacaacatgattgagatgggtgacaatttcggttaaacgcggatcgttttccgcttccagccaacgcgccacttgctgctcgccctgccccaactgtgtcaggtaatcatcggcgatctgacgaccatagcgataacccgccagccggcgcgccgcgcgatccaccttcacgcgcagcggctgcaccatatccggatgcaggatctctgcgggctgatcgtccagctcacccggcgcgcgggcgtggattttctgctccagcaggccaagcgccattgcaaatccgtacagcgtggcggcaggcgttggcgggcaccccggaatgtacacatccaccgggacgattttgtcggtaccgccccagacgcagtagagatcatggaagatgccgccgctgttgccgcaggcgccgtaagagatacaaattttcgggtccggcgccgactgccaggcgcgcagcgccggagagcgcatggcgcgggtcaccgcgccggtaaacagcagaatatcggcatgacgcggcgacggtactactttgatgccgaaacgctcggcatcaaacagcggcgaaagcgtcgcaaagatttcgatttcacagccgttacagccgccgcagtccacgcggtaaacgtatgccgaacgcttaatatttttcagtaaagacgccttcatgctggcgatggattcatccaccgtcatcggtaccggaatgccgttggcgtcacgcgggcctaataaattgctcattagctgacctctttcatatggcgagtcagttcaatacggtcggacggcaccaggcatttctgacgcttacagtccgggcaggtctcaaagctttcgcggtggttttccgcgcggctgtcgccgttgtgcgcaagcagcgcaatggcgtagtcgatctctttctgtaccgcgaaaggacgattgcacacgcggcagttgcacagcgcaaagcgggactgttgcaggaaatcttctttcttccacaccgccagttcgtactcttgcgacagtttaatcgccgccgtcgggcacacctcttcgcagcgaccgcagaagatacaacggccaagattgaactgccacgccagctcattggtcgcgagatcggtttccaccgtcagcgcgttcgacgggcaggcattaacgcaggcggcgcagccgatgcactgctgcggattatgttccggcttgccgcggaagtttttatcaaccgcaatcggctccagcggataagacgaggtcgccgtgccggttttgataacttttttgataaaggtaaacatggcgattccttatttcagcggcgagtttttacgctcaatgctgtagcgctcaagttctttgtacggcacgactttgctcttcttcttacgcacatcgaccacggtcatccggtcggtacaggagtagcacgggtcgaggctgccgataatcagcggcgcgtcggagacggtgttgccgcgcagcatatagcgcagcgtcggccagttggcgtaggtcgccgcacggcagcgccagcggtacagcttctggttgtcgccggtcatgctccagtggatatcgtcaccacgcggcgcttcagcgaagccgagcgcaaaacggtgcggaatataggtaaagccttccaccatcagcgggccgcccggcagattatccagaccgaaatcgatcatattcagcgaggtgtaaacttcgttgatacggactttcagacgagaaatcacatcgcagccctgctcgctgtgcacttccatcggcagcaggccatagcccacaaacgggtggtcggcgcgggtgtcgcgggcgtgaccgctggcgcgcaccatcgggccgacattactgaagtcacgggcaatttccgggtccagacggccgatacccacggtacgctgttccatattcggcgtgctcagcagcatgtccaccagctcctgcacgtcacgacgcatctgctgcgccagttgacgggtctggatcatgtcctctttgagcagatcgcggcgaatcccgccgatcaggttcagtccgtaagttttgcgcgcgccggtaaggatctctgccattttcatggaggtttcacgcacgcggaagaactgcataaagccggagtcaaaaccggtaaagtggcaggcgaggcctaggttcagcaggtgcgagtgcagacgctccacttccagcagaatggcgcggatcatctgcgcacgctccggcacctgaatgcccatcgcgttttccacggaagtggtgtaggcagtgctgtgcgcgaagccgcagataccacacacgcgatccgacaggaaggtgacttcgttataacccatgcgggtttccgccagtttttccataccacggtggacgtagaacaggcggtagtcggcgtcgataatgttttcgccatcgacgaacagacggaagtggcccggttcatcggaggtgacatgcagcgggccaatcggcaccacgttatttttcttgtcacccagctcgttaatgaactcgtaggtttccgcatcggtggtcggcgccgggcgctgacgataatccatactgtctttacgcagcggatagagttcatccggccagtcgtccggcagcaccagacggcgctcgtccggcagaccgaccgggattaaaccgtacatgtcgcgtacttcgcgctcaccccacacggcagccggcacgcgcggcgtaacggatgggaattccagcttattggcatccacttcaacgcgaacggtaatccagcacttcgtgccctgctccatcgacagcacgtaataaacggcatagtggccgcacaactggcgttcgtcattaccgaacagcaccgacagccacccaccctgctggtagtaaagaaactccaccacttccggcagatagtttactttcaccgtaatagtcagctgatctttggtctgccaggcttcgtccagcacgacgcccggaaacgcctggtgcagcgccgcaaggtattgttgacctaatttttcttcagacatgctcaaactctcttaaatcacgccgccagcaaggagacgaaggctaaaaacgcaaacccaaaaccggcccaggtcacgcgtgaagtggcgcaaaaacgcagtcgcgccatgctgttttcaaacagggcgatcaccagtacgccaacaatcagcttgacgacggcaatcaccagcgccagcagcagtccgcctgcgctgaaggtttccatctgtccccacggcagaaacacgccgacgaacatttgcaacaccaccagttgtttaaggctgatgccccatttcaacaccgcaaagccgctaccgctgtattcggtcaacggcccttcctgcaactcctgctccgcttccgccaggtcgaacggcagcttgcccatttcgataaaggtggcgaaggcgcaggcgcacagcgccagaatcagcggaatactgcgcgcgacaggccagtgataaatggtatcggcgatattgctgatatgagttgaacccgccacctgcgcggcgacccacagacccagcagcagaatcggctccaccagcacgccgagcatcgcttcacggctggcgccgatcgcggtgaacgggctgccggtatccaggcctgcaatagagaagaagaagcgcgcgatggcgaacaggtaaatcagggtgattaaatcacccagttgcggcaacggagatccaacggtgacgaccggcagcgcggtggcgatagtcagcatcacgccgaccatcacaaacggcgtcaggcgaaaaacccagccagaatcagcgggcgcaatactctgacgaccgagcagtttgataatgtcgcggtactcctgcaacacgcccggccctcggcgattgtgtagacgggcgcgcaccacgcgagtaataccggacagcaatggcgcaacggcaaatagcaccagcgcctgaattaacggataaaacacactcattttcaggctcctcgtgaaaccacaatcaccaccagcaccgccagctcaatcagcgccagacgacggaacagcaccgcggccgccgcgttctgccagcccggaatcaacgataccgggttgagccacttacgcagtttgagtaccggggcaaaggcctctttcaccggcatggcaaaaccgtgcgcggtaatcaccatcgactgctcatggtcgtagccgcacacccaggccgcgccgcgagaacgcgacggcagacggttgcctttgaacatcgccataatgatgaacggcagtagcggacaggcgaccaacagcagcgtgatcatcggctgcgatacggtggtgtgcgcggtttccagcggcaacggtaccgcagtggaaatcatcggcaacagccacggcgcggcaaccccgcccagtacacagcaaatcgccaatgccaccacgctgacgcccatcaggatcggcgcgcagctggcattttcagcttccttcgtgcgcggcgcgccaaggaacgtcacgccatacactttcgccatacacatcaccgccagcgcgccggtaatcgccaggccaaccgccagcagcggtcctaacagacgaccaacaaacgcaccgctgttgcccagtttgaagaaggactgataaatcacccactcgccggcaaagccgttcagcggcggcagcgccgccatcgccatcagaccgaccagcatggcgatagaaataaccggcatccgtttaccaataccgcccagtttttcgatatcgcgatgaccggtacggaaccagatgctgcccgcgcccagaaacagcacgcttttgaacaggctatggttcagcaggtgatagagcccgccggtcagacccagcgcgatcagtaccggctgattgagagcaatcccggtaacgcctgcgcccagaccgagcaaaatgatgccgatattttccagcgtgtgataggccaacaggcgctgaatgttatgctccatcagcgcgtacagaccgccgacaaaggcggtgatcatccctagcaccaacagcgccacgccccaccacagcggcgcattgccgccaagcagagatagcgtgaggatacccagcaacccgattttcatcaccacggtcgagaacagcgcggcggcgggagcgctggcgttggcgtgcgcctgcggcacccaaccgtgtagcgggataatcccggccagcagaccaaaaccgataacgccgagcagccagatatcggagcccagcggcagttgctgagcgcgttgatccagcagccccagatccagcgtgccgtagcgctgccacaccagccaacaggcgattgccagcagcagcgtaccgagacggcccagcgcaaaccacagtttgccctctttgctaccgccggtgaggaacacggcgcagagcgccatgatttccgccatcaccaccatcgtccccagattactggcgaccacggcgcagacggctgccgccatcagcaggttgattaacagcccgttggcttttacctgtggatggcgatgccagtcgatattgaacaggctgacgaacagaccgcacagccccagcgtaatcagccagatagcattcagcggcgtaatttgcagcatgtggccggtaaacggcatcacgccgctaaccgtaacggcgctggtcagcgcggtgaaccccgcgcctgccgtacacaggctgccgaccgcgccgccgataccggcaatccagccgctcagcgctttatgaaacgaaaacagaaacgccagaacggcggcggcggcaaaccacgcgacgccgctagtaatcagtgaaagtgaactcattatgcatccccactctgagcctgctgaaacaaggtgagatcgccaaaatcggtattaaacgtcagctcacgtttacgtttgctggcgcgggcgatatccgtgttctccaccaggtgtagcgctttagtcgggcacatccgcacacaggccgggccttgctcgtcaaagctgcacaggtcgcatttcaccgcgatagcgcgtacgcccggcacccagtcgagcaacgtactgacgcgcgcaggcgctggcggcgcgggcggcgctttcggcgtattggcgttcgccggaatatgcagcggacggctgccggaaaactcaatagcgccaaacggacaggcaataccacacagtttgcagctcacgcacaggctttcattaagctggacagcgccgtcaacgcgattaatcgcgttaaccgggcataccgtggcgcatggcgcatcttcacagtggtgacaaagctgcggcgcagattctttttcattcagcatcactttcaggcgcggcattgactgcaggccatgctggcgatgcgtctctgaacaggcggcctcacaggtgtggcagccgatacagagagtggagtcagcaattacaaaacgattcaccaggcattcctcaggtgattgtcatttttgacgaaaacatgccgttgaaatgtcattttcgacacttatcgacacgcccatccccaaaacattcatgacatggcgcaacgccacatcgcgaatcaaagcgggcaacgcctcaggcttataccgccgggctgtgtccctttaccaattgacgcaaattaaccggcgagttggtttctacagcggtatagaggctgtcgtaaacgctggcgattttttccagatagtgctccagcacctgctcgcgatcgcggttgttaacccgttcatcaaccttgccgtcgatatcgagctgcgcctgtgcaatcaattgtttatcttcgccatctttggtttcaacgtagtactcaatggtgtggctgttaaaaccatccgccaacgcgacgtaaatacgaaagtgctcaaacaggacaaagcaaagatccctttccggcgcgcagctcattgcgtgatgcaggcgcgctttcgagagggtgatcccctgaaccagcgagttgcagtaaatatgccactggtcctgtaggcgacgatgccgttgcgcgatgtaatcggccttttcgcttatttcccaaatagtcatgtcaggttacccgtttaacagagatgcctgcgttaagcattttccatgccaatttttaacttattgtttttaatggcagacgcgcacagttactgccgtttcgacgcggtgacgacatgtcatttcgtcatcgtcgacattaacctgccaggggataaaaatattggcataaatattgctttacaggggcaaccactacgggaggcgatatgcacgaaatcaccctctgccaacgggcactggaattgattgaacaacaggcttcagcatacggtgcaaaacgtgtgacagccgtctggatcaaaattggcgcattttcttgcgtggaaaccagcgctctttccttttgttttgatctggtatgccgcggcacgatagcagaaggttgtaaactgcacctcgaagaacaggaagccgaatgctggtgtgagcattgtcaacaatatgtcacgttgttaacccaccgtgtacgtcgttgtccgcaatgtcatagcgatacgctgcgaattgtggccgatgacggcttacaaattcggcgcatagagattgatgaaactgaagattaatgccggatagacgctcgcgtcgccatccggcagaaagcctgtaacaagaaaaagatcaggagtaagcgatgtgtacgacttgcggttgcgctgaaggcaacctttatatagaaggcgatgaacataatccgcactcagcgtttcgtagcgcgccctttgccccagcggctcgcccggcgctgaatattaccggcattaaaacgcctgactttgccccaagtcagaccgcagaaggcgatctgcattacggccacggcgaagccggaacccacgcgcctggtatgagtcagcggcggatgcttgaggttgaaatcgacgtgctggacaaaaataatcgtctggctgagcgcaaccgcgcccgtttcgccgcccgccagcaactggtgctcaacctggtgtccagccccgggtccggtaaaaccaccttgctgactgaaacgctgatgaaattgaaagaccgtgtaccgtgcgcggtgattgaaggcgaccagcagacagtgaacgacgccgcccgcatccgcgctaccggcacgcccgccattcaggtcaacaccggtaaaggctgccatcttgacgcgcaaatgatcgccgacgccgcgccgcgcctgccgctggatgaccatggtattctgtttatcgaaaacgtcggtaatcttgtctgcccggccagcttcgatctgggcgaaaagcataaagtcgcagtgctttccgtgaccgaaggtgaagataagccgctgaaatatccccatatgtttgccgctgcgtcgctcatgctgctcaataaagtcgatctgctgccctacctcaattttgacgttgagaagtgcatcgccagcgcgcgtgaagtgaacccggagattgaaattatcctgatttccgccaccagcggcgaaggcatggatcagtggctggcctggctggaggcgcagcgatgtgcataggcgttccgggtcaaatccgcgccattgacggcaatcaggcaaaagttgacgtctgcggcattcagcgcgacgtcgatctcacattagtcggcagttgtgatgaaaacggtcagccgcgtctgggtcagtgggtgctggtccatgtcggattcgccatgagcgtcattaacgaagcggaagcgcgcgacacgctcgacgcgctacaaaatatgtttgatgttgagccggacgtcggcgcactgctgtatggtgaggagagataatgcgttttgttgacgagtaccgtgcgccggaacaggtaatgcagctcattgaacacctgcgtgaacgcgccgcccttcttccttacactgccgaacgaccgctgcgcattatggaagtctgcgggggtcatacccacgcgatttttaaatttggtctcgatcagttactgcccgaaaacgtggagtttattcacggccccggttgtccggtctgcgtgctgccaatgggacgcatcgacagttgcgtggaaatcgccagccatccggaggtgattttctgcacctttggcgatgccatgcgcgtgccggggaaacagggttctctgttgcaggctaaagcgcgcggcgcggatgtgcgtattgtttattctccgatggacgcgctgaagctggcgcaggataacccgacccgcaaagtggtatttttcgggctgggctttgaaaccaccatgccgaccaccgccatcacgctgcagcaggcaaaacagcgtgacgtgcgaaacttctactttttttgccagcacattacgctgatcccgacgctgcgtagcctactggagcagccggacaacggcattgacgcctttcttgcgccaggccacgtcagcatggtcatcggcaccgaggcgtaccagtttatcgccgccgattttcatcgcccgctggtggtggctggattcgaaccgcttgatctactgcaaggcgtggtcatgctggttgagcagaaaatagcggccctaagccaggttgaaaatcaataccgtcgcgtggtgccggatgccggaaacatgctggcgcagcaggccattgccgatgtgttctgcgttaatggcgatagcgagtggcgcggtctgggcgtgattgaatcctccggcgtccacctgacgccggagtatcagcgctttgacgccgaagcgcatttccgcccagcgccgcagcaggtctatgacgatccgcgcgcccgctgcggcgaagtgctgaccggcagatgcaagccgcatcagtgcccgctatttggtaaaacatgtaatccagagaccgcgttcggcgcgctgatggtctcttccgaaggcgcatgcgccgcctggtatcagtatcgtcagcaggagtgtgaagtttgaacaatatacaactcgcccacggcagcggcggccaggctatgcaacagttgattaatagcctgtttatggaggcctttgccaacccgtggctggcggaacaagaagatcaggcgcgtctggagctggcgcagctgacggcggagggcgaccgtctggcgttttctaccgatagctatgtgatcgatccgctctttttccccggcggcaatatcggcaaactggcgatttgcggtacggcgaacgacgttgcggtgagcggcgcgatcccccgctatctctcctgcggctttatccttgaagaagggctgccgatggagacgttaaaaagcgtggtcaatagcatggcggcgaccgcgcgggaagcggatatcgccattgtaaccggcgacaccaaagttgtgcagcgcggcgcggcggataaattatttatcaacactgccggcatgggggcgattcccgccgatattcgctggggcgcgcaaacgctgagcgttggcgatgtgctgttagtcagcggtacgcttggcgatcacggcgccactatcctcaacctgcgtgagcaactgggactggatggcgagctggcgagcgactgcgcagtattaacgccgcttattcagacgctgcgtcatattgacggagtgaaggcattgcgtgacgccacgcgcggcggcgtgaatgcggtcgcccatgagtttgcggcgtcctgcggttacggtattgaattgtccgaatccgcactgccgctcaaacctgccgtgcgcggcgtctgcgagctgttggggctggatgccctgaactttgccaacgaaggaaaactggtgattgccgttgaacggcaggccgcagatcgggcgttggcggcattacgcgcgcatccgctgggacgtgatgcggcgctgattggcgaagtcgtggaacgcaaaggcgttcgcttagccggactctatggcgtgaagcgaacccttgatttgccacacgccgaaccattacctcgtatatgctagcagcctgttgacagcatactgtaagccggataagacgcatttgcgtcgacatccggcattaacgctgcatgaacgcctgatggcgctttgcttatcaggcctacggagtgtgtgaccagcgagtttgcggtcagccatccggcaataacttacgacttatacctataattcatttaccgttttcgcaccgttttgcggtattttcctggaaaagcaacatgtcgtatacacccatgagcgatcttggacagcaaggcttgttcgatatcactcgtaccttattgcagcagcccgatttggcgtcgctcagtgaagcgctttcgcaactggtaaagcgttcagcgctcgccgacagcgccggcattgtgctatggcaggcgcagtcgcaacgcgcacaatattatgcgacgcgagaaaatggccgtcctgttgaatatgaagatgaaaccgtactggcgcacggcccggtacgtcgcatcctttctcgccccgatgcattgcactgtaatttccatgagtttaccgaaacctggccgcagcttgccgcgagcggcctctaccctgaatttggtcattactgtctgcttcctttagccgcggagggccgtattttcggcggctgcgaattcatccgtcaggaagatcgcccctggagtgaaaaggaatatgaccgtctgcatacgtttacccaaattgtcggcgtggtcgccgagcaaattcaaaaccgggtaaacaataacgtcgattatgatctgttgtgccgcgaacgcgataacttccgtattctggttgcgattaccaacgccgtcctgtcgcgtctggatattgatgaactggtaagcgaagtcgcaaaagagattcaccactatttcaatatcgacgcgatcagcatcgtgttgcgcagccatcgcaaaaataagctgaatatctactccacccactaccttgatgagcatcatccggcgcacgaacagagcgaagtcgacgaagccggcacgctcacggagcgcgtctttaaaagtaaagagatgctgcttatcaacctcaacgaacgcgatccgcttgccccctacgaacgcatgctgttcgatacctggggcaatcagatccagacgctttgcctgctgccgttgatgtccggcaagacgatgcttggcgtgctcaaactggcccagtgcgaagaaaaagtgtttaccaccgccaacctcaagctgctgcgtcagattgccgaacgggtagccattgccgtggataatgcgctggcctatcaggaaatccaccgactgaaggaacgcctggtcgacgaaaacctggcgctcacggaacagcttaataacgtcgacagcgagtttggcgagatcatcggacgcagcgaagcgatgtacaacgtgctaaagcaggttgagatggtggcgcagagcgacagtaccgtgctgattctgggcgaaacgggaaccggtaaagagttgattgcccgcgccattcacaacctgagcggacgtagcgggcgcaggatggtaaagatgaactgcgccgcgatgccggcggggctgctggaaagcgatctgtttggtcatgagcgcggcgcgtttaccggcgccagcgcgcagcggattggccgtttcgagctggcggataaaagctcgctgtttctggatgaagtgggcgacatgccgctggagctacagcctaagctgctgcgcgtccttcaggagcaagagtttgaacgtctcggcagcaataaactgatccagaccgacgtgcggctgatcgccgcgactaaccgcgatctgaaaaaaatggtcgccgatcgcgaattccgtaacgatctctactatcggctgaatgtttttccgatccagcttcctccgttgcgcgaacgtccggaagatattccactactggtcaaagcgttcactttcaaaatcgcccgccgaatggggcgtaatatcgacagcattcccgccgaaacgctgcgcacgcttagcagcatggaatggccggggaacgttcgcgagctggagaatgtcgtcgagcgcgccgtgctgctgacgcgcggcaatgtgctacaactgtcgctgccggatattaccgccgtaacgcccgatacctcgcctgttgcgactgaaagcgccaaagaaggcgaagatgaatatcagcttattatacgcgtgctgaaagagaccaatggcgtagtggctggaccaaaaggcgcggcgcagcgtctggggcttaaacgaaccaccctgctgtcgcgtatgaagcgattgggtattgataaagacgcgttagcgtaacgggttgccggatctgatccggcctggagatgatgcgcgccgtaggcctggcgcttccccttcacttcttgcgctgatatttttccggcaattccggaacggggcgcttatcgtcgataaggtgccgcacggtcaggacaggatgccgccaaagcattcgcggacctgcccaacgcataatctgcttcatctcctcgcgtttagccggctgatagcagtgcaccgggcactgcttacaggcgggtttttcctcgccaaatacgcatttatcaagacgtttttgcgcgtaggcgaacagcgcgtcgtaatgcccctgcaccgttgacgcctgtgggcactggctttcatacagcgcgatcatttttttgatcgtcagtttttcacgagcgatacgtttaccaggcatcgtgctctctccgaacattaaggtgtatttattttacaccttatccctctttagcactatcactgcatattgtcgccatttcgcaaataagaattattttcatttatccataccttgtgctatataacatagcaaaggctatattcgatgattaattaaccacattgttgcgagggatactatgacgaatctacatcgtctgaaaacactcctgattgccggtattgtcgcgatactcgcgctatcgccagcctatgcaaaagagaaatttaaagttatcaccacgtttaccgttattgccgacatggcgaaaaacgtggcgggcgacgcagcggaagtcagctcgattaccaaacccggcgctgaaatccatgagtatcagccaacgcccggcgatattaaacgagcgcagggggcacagcttatcctcgcgaatggtctgaacctggagcgatggttcgcccgcttttatcagcacctttccggcgtgccggaagtcgtcgtctccaccggcgtcaaaccgatgggcattaccgaaggcccgtataacggtaaaccgaacccgcacgcctggatgtcggcagaaaacgcgctgatttatgtcgataacattcgcgacgccctggtgaagtacgatccggataatgcgcagatctataagcaaaatgccgaacgctataaagcgaaaattcgccagatggccgatccgttgcgtgccgaactggaaaaaattcccgccgatcagcgctggttggtcaccagtgaaggcgcgttctcttacctggcgcgcgataacgacatgaaagagctttatctctggccaattaacgccgatcaacaggggacgccaaaacaggtgcgtaaagtgattgataccattaaaaagcaccatattcccgccatctttagcgagagtacggtttccgataaaccggcccgtcaggtcgcgcgtgaatccggcgcgcattatggcggcgtgctgtatgtcgattctctgagcgccgctgacggccctgtgccaacctatctggatctgctgcgcgtcacgaccgaaaccatcgtcaacggcattaacgacggactgaggagtcaacaatgagtcaatctgcgattaccgttgatcaagtcacggtgacgtatcgcaacggtcataccgccctacgggacgccacttttcaggtgcctggcggttcaatcgccgcgctggtaggcgtaaatggttccggtaagtctacgttatttaaagcgttaatgggctttgtgcatcttgcgcagggcgatatcactatcctgcaacagtcagtcaacaaggcactgaaaaaaaacctcattgcttatgttccgcaatcggaagaagtggactggtcatttccggtgctggtagaagatgtggtgatgatgggacgctacggccatatgggctggctacgccgtcccactgcgcatgatcacgcctgtgttgacgccgcgctggcgcgggtggatatgcaggagtatcgtcacaggcagattggcgagctgtccggcgggcagaaaaaacgtgtgtttcttgccagggccatcgctcaggatggacaggtgatcctgctggatgaaccttttaccggcgtggatgtaaaaaccgaagcgcgaatcatcgatctactgcgggaactgcgcgatgaaggccgcacgatgctggtctcaacgcataatctcggctccgtcaccgagttttgcgactatacggtaatgattaaaggaaccgtactggccagcggccctaccgaaaccacgtttaccgccgcgaatctggaacaggcgtttagcggcgttctacgtcatatcgcgttaagcggaggtgaagagcacatcatcaccgatgacgagcgcccctttatttcccggcgcgtggccagcggaggaaaatcgtcatgaactggcttgttgagccgtttggctaccagtatatgctcaacgcgatgtgggtctccgcgatggtgggcggtctgtgcgcgtttctctcctgctatttgatgctcaaaggctggtcgctcattggcgatgcgctatctcactctattgtgcctggcgtcgctggcgcctggatgttagggctgcccttctcgctcggcgcgtttctttccggcggactggcggcaggcagtatgctctttcttaaccaacgctcacgcctgaaagaagacgcgattatcgggcttatcttctcctctttttttggcgtcggcctttttatggtgtcgctcaatccgatgtcggtgaatatccagacgattattctcggcaacgtgctggcgatcgcaccagcggatattgcgcaactggcgattatcggcgcagtctcgctgacgattctgctgttaaagtggaaagatctgatggtcgtctttttcgatgaaacccatgcgcgttctatcgggcttaatccgggtcgactaaagctgttgtttttcactctattgtccgtctctaccgtggcggccctgcaaaccgttggggcgttcctggtgatctgtctcgtcgtcacgccgggcgcgacggcctggttactcaccgaccgttttccacgtctgctcatgattgccgtcgtgattggcagcctgaccagttttctgggcgcatggcttagctactggctggatggcgccacgggtggaattattgtcgtcatgcaaaccttactgttcatcacagcctttattttcgccccgaaacacggtctgttagccaaccgtcgacgcgcccgcctgcagaaggagccgacatgttcttaacaacgttactggaaccctttcagtttgattttatggtgaacgcccttatggtttcggtcattgtggcgattccctgcgccttactgtccgtgtttttagtgttaaaaggctgggcgttaatgggcgatgcaatgagtcatgcggtattccccggggtcgtgctggcatatattgtggggatccccctggcgattggcgctttcattgccggattattttgcgctatcgccaccggctatctggacgataacagccgcatcaaacgtgatacggtgatgggcatcgtcttttccgggatgtttggcgcaggtctggtgctctatgtttctattcaatcggaagtgcatctggatcacatcctgtttggggatatgctgggcgtatcgctgggggatatcgtacaaacgtcagttattgcactgggtattgcgttaatcatagggctgaaatggaaagatctcctgctacacgcttttgacccgcaccaggcgaaagccagcgggctgaataccacactactgcattatggcctgctatgtatgattgcgctgactatcgtcgccacgctgaaatcggtgggcattattctgtcaatctcactgcttatcgcccccggcgcaattgccattttgctgacgcgacgctttgcgcgcgcgctgggattagcggtgagtctgtcagttattaccgcttttgcgggcgtttatctgtctttttatcttgatagcgcgccagcgccgaccatcgtggtattatttgccatcgtgtttattgcggcatttatttacgcaacatggcgcgacaggcgtaatgaaatcgtaccagaggcgcaaggttaacacttttttgcctgctattcaggaaacatacggtcataatatagagtagtcttatggcgctggaaggatttcctctggcaggcaaccttataatttcattacggtttaagtaaagacttatattcagctatcctttttttatgagcggatatagagagttttttatcgtttagcataacggcattgttatcgaatcgctcataaagcgttcattctttttgtttactatactgcttcccgccgccggattggcctccacatattcatttaatcgttgtgcgccttgagtatgtttgtaaaaactcaccggcagatagcggtctgctttatcggacgggagaaaaggttcttcaccacacagacgttcacaaatattatcttcatgaatttttactaagttcataaattcaagctgaagttttttggcgagcgccaggctaaaaataccgcattcagaagagcttcgttgaatgtccagctcgaccatagcaaaataacaatcaggcagttgttcacgttcaagagctgctttggtcctcaacgccagtaaagcaggtccaaaagcgctacacgctgctggttcgaacaaaatcaccgatgtctttccgtccataactctaaaatcgacgactgaaatatggatacctgaacttcccatatttacgagaaatcgggcagattcaacgccttccattctggtctcctttatagaggaaacaagctcatggactgacataacaaatttaagatttaactctggatacttcttattggcctgtgcaacaagaaaaggcatcatttcgagatcggtttcctcgtaactgatatgaatccagctgccatctataatttcactttccagacgctcaacaatacaggtcaatgcttcggtgtttagctccccgctgacgtcaggctgaggcgataaactcgcccccatattacgagtcgtaggacttagcatacttttccctccacatgatagctcctgcaccgaaaatatcatctttaacttttcagattcaatatattgcctgcaaaaatatgcctcaatgattgagccaggctaccaaccacctccggatgattatatataagaattactactcaaaaaatcttttttataataaaagctcaacacatggtcataaatgataaaaaatattttaattcattcctaccgcaatcggtaacgcgcaattatcgtcaggtacagcagggttatgtgcaaaagcagtgcgctgtaaatgcgcgtctagtttcagtccccggaacagcgatagcggtgaagagtccatccccaaacgatacataaccttcttacgataaatactgacggtttttgttcccagaccaaattttttcgccagttcaattgccggatgtccggaggataataatatcagcagcgcatatttcgcctgcgtgacaccgggaggtagattccaccaggcgtattgattgatattaaacaatacctcttccggcgtctcgccggcattaaaagcatacgtagcagccacggttttcttttgtggcctgtggcagaaacgcagccaggcttccggaagacggagcttctctcgctccgagcggatagcgcaggatagttcgtcttttaaaacataatccataacgccaaaatattgcagcacacagcgatcgatataatacaagcgatctgccactaccaaaactttacggttctgcaaccgcgtcagcaacgcatgaaaaagataaacatgctcatgcgggttcaaagctaaaatcagcccggcgtccggcatatcggatagggaatgcaaaagtgcagttaatgagttacacgttttaacgcacttttccggatatttttgcttaaaaatagactgtagggcataacaattagtccagttaataccgtatataattacatttctcatttatttatccttttttgaaaactgaccacagcttcggtaatgatttttcttcctgggcgactactgcgcaagtagataacgccttcttactacaaaggtaataagaccagatacgttattacatgcgcaatgtcgttaccgaaatgaattccttttacaaatctgataatgattaaatttgctgttttactttactgtaatctcttagagtacaacgattgcccggcgcctggtggccatgtatgtctgacaatgaacgctttcgattccctttcattaactacatatcactggtgtagcgatactgaaatatacactacgattaaaaaaatatttggtatctgtaacgcaaacagatagtaacgtttaaaataatttcacaaatcaatggttcattgtacgcataaagctaagcggtgtaatcttaaaatgccgtttaaaaatagcgataaaataagaaggcgtatcatagccacacatcgtcgcgacttgtgaaatatttccagcccccatacgtaataattttatagcctgattcatacgagcatccaggtatattttactaaaactcacctcttcagcggccagttttcgcttcagacttgatacgctcataaacagctttcctgccacctcagcctgtgaccatttgcgggtgagatcgctgataataatgttataaactttctcttttgtcgtaatttttattgctcgctcaaggaaatcaaacccaccgggcttacgtacaaatgccgatataagatacatcaatgagaaatatgaataatcatgatcatcaatactcacattactacaaacccgtggacatgccacaccatgcaaaatagagtcaaaagtatcactcatccctggcaacaagtccgcatgaaaaaaatactttggtttcgtttttaatgatagctctcgatcattatagtttcttgtactgtaaaaaactttgtagaatttttgcattaagtcataggaaacttccagtgaagaaaaatcaatatgcccttctatttcgctcatactaagcgtgattgtttgatctttttccaataaaaataaacacggcgcagatcgttcgatgaactccccaaattcgttttcaattcgcaaactgcctttattaagtttaaacaataagcagtttgcgacataatagtctcttacgtcagctaatccatttattaatggaaatttgttcggctgttgaaggtgattattgctaatggcctcaactgatttattcattgaaggcaataccatattttatcctgtgtgctataaggaactcaaaatcgttatattcttataaacaaataattaaaactcacagagatgatttaaatccgatttttttattattatagccaataattacattccaacgcgcgttcatttcgtcacaaaaagatacccttacaaactttatgcacaattttgtaatgaaagcttacaatattaatataatcatttcagaataaaacggctggcagacatcttaataatccatatacatcaataagatagacacactggcatggtgcattttctgcattatttgctgatatatacaccataccttatcacaaatcgccagcaatgggggttcaccagtcaattgcctctttgttttccccgcccgataaaataatctcctgcatccaggaggtcatttgtgactgtgcgttcattgaaccaactaataccccgtttaaagcctcatataaatgggtgcccggttcaacttttgctaacatgttttgtagcatagccgtttgctgctcaaaagaaacaaaagccgaatcaccactgttaggatctttgaaggcattcatctcttgataaatgctatctttaagcgtttcagaagaggctgactcaggaagcgccaaaagtcgttggtagaatgcatcataaagatcaacgtcgccgccattgcttaaaggcgcgctatccatattattcagcatagcggccctggcactcaacgaaaccacacccgtcgcttcagtatctgctgtcgggaccaaataagaagtcggaatcgtacccggtatcaccttataacctccgcttgcgtttttgtcttccattcatcaataagtgcgttaatggcgttatcagaaattgtccggcagtcttgtggaagttcatcaagatgatgcttaatgacgcctactgccgtttcaacaaattgttcaggtgaaaattctgcgatctgatcgccgcaactcatgataaagcgctgttcctggtgatatttaagattaaaagtgcctggccagttctccataagcaacaccatcagtttttggtgatcttttttcgcattaactggcagtgttaaaaaaagttgcccctcaggcttatcgaaatcccttagccactcatccaggacggttaaaagcgtttcgggatggtcgaccgcagctgaaaataactcgcgggcataaatctgtattttttccatccacttccaggccattgtctgattatcagtaagataagcggcgacctgctgtaacgcgtctatcattccctgctcgtaaccttcctgataggcgtacatccgcaaggtctttgcctcttcttccgcctctcgcaaaatacgcttagcccgttgatgcgcctgctgttctaatctttcaatagagaaataacgttccagcgttttacgctttatcagtatcccctcaacaggcgaaagcggggacggtattgggatatttttgagcatattgtaaggccagtagcaaaattgacatttctacagcatcctgcttcaatgcctcctcaataaatggaggaaaaagcaaaggaaaacgctgtgctaaagattcaggtaaaaattcatttagggcatttaactgtgcatacccgacgctaagtaaaaaccggtgattcggcgccttattgcagacagataaacttgttccctgatgcattgccaaaaatgcttgcgcccaatccggcaggccaagcaaggctccctgccttgccagatcggctctcagtttatggcaaccgagtaaatacgctacttgcggcagtcggcgccactgacgcagccacagctgcgtcagtgagttttgaatacactccttttctccgttcttaagccgccatgccgccagtattaactcatttgccgccgccctggcggcgggtctgacaatcatttccggcgctatctgcaaccgctgaggatggatatacgataacggatcaaaaatgattctttgccagataatgggtaatggctgcctattcatttgacgatttcgccttatcatcagccgttatgcctttcttattgcgggcataatggtttttgtaataccagacgccaaagcctgctgacatcacggataacaaaataatcaaaacaatccaactggttgcaaaagaattacgttttactggtgtgccgggagcctgtaattgggcatcagaacgttctgacaacacaacagaaatgttgtcataatccacatcggcaaaactattctttaagaaacgcttgatatcgctgatctgatgcgcaagcggcgaacctcgttcatatacggctaatgccgacagatgaacaggttttggcgggcggccattttcaccagcatcaatatcataactaatatggaccctggcggagagcacgccctccatcgtctgtaatgactgttccagtcgctgttcaatagccgaatataacctggccttttcagctcgcggagacgataccagcgaatccgccgggaacatctgcgctatttccacccgtggccggggaggaagctgataagttttaatccagtacaccgcagcggtaaaatcaggctcagcaacggtaatgctatagcccaattttccgctatcaattttattcgcctctatattgtgcatttgcagaacggcaatgacctcattagcctgttcctggtccagtccttttaaaagatccttatccttacagccggcaagggtcattaccagcagaaaagtatatagatatcgacgaatcatgagcgtaatagcgtttcaacagccccgactcctttacgagtaagggtactgaccatagaaacatacaggttataatctgaaatcatctcttgcgaaatagccagctctttaggatccgtcaccagattagggtcctcaatcctgttggtaatcgtctgtttatccacagccgtggcaatcgccgaaccagaaaaagcctggagtagccggtcatccagcgagacaatgtccgtttccatagacctgatattgaccgcctgccctataacggcattctcagggacaatagttgcaatcgacataatccaccttataactgattaacggaagttctgaataatggcagcatcaatatccttaaagacttttaccgtgttcgattgcgcgttacggtacaagttatattccgagagcttactctgatacgccgccagtagcgccggatcggagggttttgctgctaatttatccagcgcctctgttacctgcgtttgtagattatcaacgcccgtatcaaattttgctgagacgtcatccagatagcctgaccaaggtgttgccataatgacttccttatttacgttaaattaaagtgggcttgggaaataccaatggcctgggctcattttgatataaccttccgccccgtactgaaatgagcgccccttgagccagtcatcttttaattcgatcgcaaactgcacatagcgtcctccccatgtgcggtaatagctatcgacaaattgacgggctctgagtatttctacatcatcgagcgccccctgaataacaaacgttacgccccccttatgattcctgcgggaataaggtaacgcctgctgttttagccccgcttccgcctggcctgctgcggtaacatcgtccatcaacgtgatgttaaccgaatccgcgtaaggcattagcgctctcagcttttgacttaacacctcgagctctttcttgctcatcgtgtttcgctggcggcttagccagaaaacgggtttacgcggctcatcgaaatgaatccgataataagccagctgcggataataggtatccagccagatagagatacgcttattttcttcgttttcgttaatcactcgcgcatttttatcataatcgcccctcgctaaaacctgacgagcccacaacgtatctctttcattttgcgcagcgacatagagcattttgtcccggcctggcaacacctgaaaacgctccttctcctgccccaataacgaatcgagctctgcggcctgccgctgcggcgagttaagtatccataacgtccccacagtcccaattcccaatataaaaaacccggccagtgctgctacaattccgtttttaaaacgcggctcgttcttttttgcagacgtttctaacttctcaggctgctcgggcacccacggctcgctttccgggcgaatcaggataagcaattcaccgacctgtattggcgtatttaattgcaccgaacgagattcagaatttccttctttcagctcatggagtataatttcggtcgcatccgtatccacctggatttcaaaatttactccgccatggtccagcgggataaaaaagctatcggcaggtatatcagggagttgacctgaagcagtgagcgcatcactctgacctaccacaaagagtgttcggcctgtcagcaatggaaactcacagccgttcagtgagctgttaagtaatcgaactatgtatggccctgggcttgttatcgtcttctcttttgatgtttccatatatactgttagcgatgtctgtcgttctcgatagcagcagattaccgcacaggacacagggattcctgatgaaaatagaatgaaaagtgagaaataaaatcaatttattctgtataatgcgtctcaacacatattaaaagaaccatcatccccattggggcttaaactactgtagataaattacccaaatttgggttcttttggtgtaacaatcagaccattgccaacacacgctaataaagagcatttacaactcagattttttcagtaggataccagtaaggaacattaaaataacatcaacaaagggataatatggaaaatgtaacctttgtaagtaatagtcatcagcgtcctgccgcagataacttacagaaattaaaatcacttttgacaaatacccggcagcaaattaaaagtcagactcagcaggttaccatcaaaaatctttatgtaagcagtttcactttagtttgctttcggagcggtaaactgacgattagcaataatcacgatacgatttactgtgacgaacctgggatgttggtgctcaaaaaagagcaggtagttaacgtgacgcttgaagaggtcaatggccacatggatttcgatatactcgagataccgacgcaacgacttggcgctctctatgcacttatcccaaacgagcagcaaaccaaaatggcggtacccacagagaaagcgcagaagatcttctatacgcctgactttcctgccagaagagaggtatttgaacatctgaaaacggcgttctcctgtacgaaggatacaagcaaaggttgcagtaactgtaacaacaaaagttgtattgaaaatgaagagttaattccttattttctgctgttcctgcttactgcttttctccgactcccggagagttatgagatcatccttagctcggctcagataacgttaaaggagcgcgtttacaacattatatcttcgtcacccagtagacagtggaagcttacggatgttgccgatcatatatttatgagtacgtcaacgctcaaacggaaacttgcagaagaaggtaccagctttagcgacatctacttatcggcaagaatgaatcaggcagcaaaacttttacgcataggcaaccataatgttaatgctgtagcattaaaatgtggttatgatagcacgtcctacttcattcaatgtttcaaaaaatattttaaaactacgccatcgacattcataaaaatggcgaaccattaacattttttgtatctgtcacttaagtaaagatttttattaaaattgtaataatttaaaattcagactgcgcattaacacgctctatcaggatgggaggctattcaatatcattgttctgtccggaagacagcttatactgatatctatggtaatttaaagtaaggctgattatataacacgatttttgtgaacttgtcatcgctatgatgactggtaaaacgatattgccttattcacatcgtaagaattcgtccagatgacactatctccttccggctttaaccctgtggattaaggccggcattttattcatatttatacatcatccgttccctctgagaactatttgcctgaacggtttataccgaaacagtcacgcttgttagctttctgccaggcatacctcctctcttcctcctgatatcgatataatgcctggagccagcctgaggatgatactgctcataaccctcctgcctttttgacgctataactgaagggagtaaagaaaagacgatatcattattttgcaaaaaaatataaaaataagcgcaccattaaaaacagtctttcatttatattttggaacctaagacaaattacactcttaaactttcaacgaatggtcatttagtggaaatcttcgagaaaaatggttctgatggtgtaattatcagaccattaaccatgaagatataataagcagcatttacaccccaaaaaaatgcagtaagatagctacaaaactaatctctattgcaatgaggccaagttaaatatgtaaatatttagatgcccggcgctgactctctctgcaccaggatatacggcagcgtccattcgataatcacagttagttataacaatattattaccaacatgtcagttatttaaagcacaggcataagctaaataatcaaatgttaaaaacatataaacccgagcccgtagaatatgacattaagctcataataaaagctcaacctgaccgttagtactaacagcagaattactgaaacagtagattctatcctaacgacttgtattagttattataacttttcaccctgtaagagaatacactattatcatgccacattttaatcctgttcctgtatcgaataaaaaattcgtctttgatgatttcatactcaacatggacggctccctgctacgctcagaaaagaaagtcaatattccgccaaaagaatatgccgttctggtcatcctgctcgaagccgccggcgagattgtgagtaaaaacaccttactggaccaggtatggggcgacgcggaagttaacgaagaatctcttacccgctgtatttatgccttacgacgtattctgtcggaagataaagagcatcgttacattgaaacactgtacggacagggctatcggtttaatcgtccggtcgtagtggtgtctccgccagcgccgcaacctacgactcatacattggcgatacttccttttcagatgcaggatcaggttcaatccgagagtctgcattactctatcgtgaagggattatcgcagtatgcgccctttggcctgagcgtgctgccggtgaccattacgaagaactgccgcagtgttaaggatattcttgagctcatggatcaattacgccccgattattatatctccgggcagatgatacccgatggtaatgataatattgtacagattgagatagttcgggttaaaggttatcacctgctgcaccaggaaagcattaagttgatagaacaccaacccgcttctctcttgcaaaacaaaattgcgaatcttttgctcagatgtattcccggacttcgctgggacacaaagcagattagcgagctaaattcgattgacagtactatggtttacttacgcggtaagcatgagttaaatcaatacaccccctatagcttacagcaagcgcttaaattgctgactcaatgcgttaacatgtcgccaaacagcattgcgccttactgtgcgctggcagaatgctacctcagcatggcgcaaatggggatttttgataaacaaaacgctatgatcaaagctaaagaacatgcgattaaggcgacagagctggaccacaataatccacaagctttaggattactggggctaattaatacgattcactcagaatacatcgtcgggagtttgctattcaaacaagctaacttactttcgcccatttctgcagatattaaatattattatggctggaatcttttcatggctggtcagttggaggaggccttacaaacgattaacgagtgtttaaaattggacccaacgcgcgcagccgcagggatcactaagctgtggattacctattatcataccggtattgatgatgctatacgtttaggcgatgaattacgctcacaacacctgcaggataatccaatattattaagtatgcaggttatgtttctttcgcttaaaggtaaacatgaactggcacgaaaattaactaaagaaatatccacgcaggaaataacaggacttattgctgttaatcttctttacgctgaatattgtcagaatagtgagcgtgccttaccgacgataagagaatttctggaaagtgaacagcgtatagataataatccgggattattaccgttagtgctggttgcccacggcgaagctattgccgagaaaatgtggaataaatttaaaaacgaagacaatatttggttcaaaagatggaaacaggatccccgcttgattaaattacggtaaaatctgagagaggagatatgcattatttttttatcatcgtaatctggttgcttagcataaatacggcatgggctgattgctggcttcaggctgaaaaaatgttcaatattgaatccgaactactttacgctatcgcccagcaggaatcggcgatgaaacctggcgccattggtcataaccgagatggttcaaccgatcttggcctgatgcaaattaacagcttccatatgaaaaggctgaaaaaaatggggattagtgaaaaacagttgttacaggacccctgcatttctgtcattgtgggcgcctccattttatcagatatgatgaaaatctacggttatagctgggaggccgttggcgcttataatgccgggacgtcgccgaaacgatcggatataaggaaacgttatgctaaaaaaatttgggagaattacagaaaattaaaaggaatgtcagcagaagagaaaaacaaaagactttctatcgcggcaaacaaataattatacagaaatagcttactttcagatagttctaaaagtaagctatgtttttatcagcttgccgtcgtcataagcaactgggcttgcattgcttttagttgtacaaactgtgaggcgtcttccagcattctattgttccgtgaatcccggaaatctgcacgtacctgctccagattactatgaggattatccttaagtacaagggccgccgccatcgttccggttcttcccactccgcccagacaatgaatcatcggtaaatgcttatctgatgaactacgccccggcgcgccattttggttactatttttcaccctatccgccaggtattctaactgatccgtagacggtaacggctggtgatctggccaatttttcacatgcaataccgggattgtataccgcttttccccgcaggacagttgcatattgtattggtctatcgcttctccctgactggctgagctcactttttggctgttggtatgcacctcgccaaaggtgtagctccctctgaaatagggtggtaattgttttgcctgcatctgatcttccgacgttaacaccaccaggcacgagcattctttttcaagaagcattttcatatgcgcttccagcgcatccggcgtattttttgggtacgaaccggctaatgccacaggcttaccgtcaaaagttaacgtattcactggcacaggcattccatcgctcagtttcacctgggtttgctgattaattggaatgctgctgaccgcaaatcgtgccaggcccagtgtcggtccgctcatcgtctgtggcattggcgcgccggcttctattttctcaagttcagctgtaacatttttcagttctttagcaataacgtgaattttttttacagcctgggttaattcatgagtagaggctttatcaacccacctctcaacctctcctccacaggttccccattgtgagaaccgggctacaccgacctgaatatttgttaacgttgtaacataatcattaagttgtttagcctctggaattttatttaaattctgtaaattcgtcattaatgaacgcagcgggccgttacctgaagccatctcctggaagttttctcgcaggctatttccatccatttgttccagttgcggtaatgttcttttaagtccctttagcgcgatatcgagtaaaggttgcttactttctgctccaacatcgttatttttttctgccacttttgtatcgccgccttttatgactaaagcggcattcctgacaccaacattatccttgctcttaataaggtttataaacccttcgtcagcagcttttacacactccgtgatctgcactgctaaacgttgggtaaggggtttgttcatatttatacgggacattaacagtgcgtcattaaccgctgtttccccatatttttccgttagtgcatggagaaatgtctgtaaaatcttttggtcctgtactctgatattttccgtatgtttttgcaccacttcagtgtttttaaataacggcatttttccaagccaggttaatacttttgacgaaaatttttcaggcgcaacatatgccttatcagtattttccttagcaatataaagtcgggcatcattcgacacaccaacttttgaaaacgaagacaacgttaaattattcaattttctctcctcatactttagcatattcctgcagtatgtttttgagcgcttcctgctgattcacaaatgactcaagctgcgatataatatggtaagtatttgtcagatcggtaattgcatgtataagcaacaacgtctctgcggcatcaatatacgctaacgtaccttcattattcgcagccagttcaccattaatcaccataatctgccgccagatagaatcgccacaaacaggcgataacggtataatcataccgttcaataaccagatatcatctttagcttcaatagacgtaaaaatatcgctatcgagtaataataagcactgattgttgtcgtcaaaagtgagcggtaaacccaatttctcaccaatattagcgataatatcctggtgtgcttgcaatttactttcctcttgaattatatcttttataagattgcttcttcaaatttaatctggttacacaatgtcttgatactttttcgcgcccatcgccgggcgcaatatttctctcctttaatccagtagaatagccattcactacgcatcggaacacatatcagcagctccttcggatcattttcaacatgacgtaacttgcctttaataacaaaacgcgaactgtcagcaatatcatcatatattgcagccatacctgaaccgggtactacatgtgtgatgattttcataacaattaatcttattcaattgttgtcaagcgagagaaaaatactacaccctggactcaagactttttttaacaacacggcatatatccgcaaaggtcatcatatcaggaagatcgttttcattgcaactaatgtcaaactcctcactaagaccaaatacaatatcaattaaatccaatgagtcagcgtaaagatcctcaaccagatgggtctgaccattgatactatcaacatcaacggcaatacaagaggtgatcacttttttgactcttgcttcaatatccatattcatcgcatctttcccggttaattaacgctgcatgtgcaagccatcaacggtagtaataacccgatccacgccaggtttattcaggtatgactcgtaagccgggccagctcgccagctaccgtctccgataaggccgtccagcacattacttaacacatagtcagtttccccttttagcctggtcagccccgcctctctggcaaactgcagtgcaatctcagccagtttttctttttgtggatgatgagtaatgacctctttgagagtctccattttcgctttcaattctgggtgcttgtcaatatcgctacattgcgctttcaacgctgcactctttatcgtgtcattgggtaatatttccgcacgcaagccgtcaaacgctctgcgtacagggaacggtgtggaggtatctggctccagggctttacgtatcacacccaaaaacgtctcacgggcgtcgaaatgcattgaatgcatattcgtaacgctcggtactgttgagaggaaactattttgcttaaacttcaaaccagaaaatgggccagtcttatctgtctgactattatcattatcggtcgtaccggctttattacctgtaattaccgtcgtgtctgattgtaaggtatcggttttaacattctcgacgccagccagttgactggcaagcggcttcacattcacaatctctgccgtctggctttgctgtttattatcatcaacgccgtgcaccgtggcctgtaccggcttgccgataatgctcttgctggttacgccatcgacttcatcaaaagaggttgtttcacccgtagtgcccttttctgacgtgaccacctttccatctttactttcggatgaagcgttggtcacagcctctgccgtcgcatgagccgtgacgtcaattttacccgcgatgccatggtcaattgcccctgtgctggcgctgtgtgccgtctccgtttgatgcgtagtcgaatccacacgcgaatgactatgacttacgttgctgctgttagtcgaatggtgtgactcgccattgcgttggctgttatcaataaatgttcggctattatcaatcgtcttccggctattatcatggttgctattatcgatatagcgctggctattatcgacatggcttcggctattgttaatatgcttactgttatccacgctatggttactgctatcaatattaatattgatattaatacccgtaggttctgcttttttcccaccatcaggtactggtccagccgcaggctccggaattttagggtcaggcagtttatctgcaggaatttgtgcaaaaacattacgtagcagcaggggtatcaacgtttgcatttcaaggtgccgggcttcccgtcctacgctggtaccctgctcttgcgttaatttttggtggcacatatcaagcgcctcaacagccttcgccgccgctttgtcaacaaggtgcgtaagattgctgcgggttaacggatctaacgtacagccaaagttatgttcaatgcagctggcaatatagggcatcacctcctgcataacaagattcgtcgataatttacttaattcaccgccagtgttatttttgataatatctaacagctgcttttccaggttttccagcttcgcttccgctttctttgtttctggcagccatggcccaaaagctgacttttctttcaggccatcttttatgatttgcgcggtatactctgcccccaccttcatcagtagcgtcttcgcctcaggagaatcactggtggcgttgagcgctgaacgaaagagcccggcaaactccattatcgctttcttaccggcgacattatttgaattggtaaaaacttcttttaacgcctcagcgtctttcccgcatttaaacaatgcatccagactcgcctgtttgatcagcgcgggaaaatcttccagttgcgggcctttaatttcccctgacagcgtcgctgtggcactttctctgactgcggaaagattcgccgcaagattcgtggcctgcgttttgatctcggtctgcatacctggcattatgacggggggctgagtccttacacttgtaaccattattaatatcctcttctgttatccttgcaggaagcttttggcggtttccaggctgctacttatcgtactgctcagcacttttaccaggttgtcgtacaatgaattggcattgctatatttttgcgtcagcgtctgtaatgtggttttcatattttcttcctgcgctttaaaacccgactgccaggcttgatatttggcgttatccatttcgagttttgagtcttttcccggcgcgcctaaaccatcaatatcctgaaccattttttgtaatggcgtcagatcaacggtgacgacataaccggatccataagatttcaggcagctattcggtaaattcaattcactgagccactgtctcgcttccgcttcagtggctactttaacgccgctgcctgactgcgctggaaataaaacggtattactgtttatttgattatatttattgactaaactgtttaaatcatttttgagtgaggtaacatctagcttaacggtattaccgtccttacctggtaataaccagcctcccattttggaaagaatatcactgaaggcctgataaaaatcggtatagactgcgacaacgttttcataaacgcccagatagctgtcacctatcgccgatatattttgggaaaccatatcccaaatctcagcatcagaaatggttgttctcggctgcgccataggcgaagcgctaaataaggccgacgtcggcgcagaaaacgcgctccgcaggttctcattttgttctgcggataatgacacgccggacttcgccagcgcattcaggctgctggtcaactgctggcgcgccagcgtgcgctcgtcattattctcttcagagatcggtggcgttgactgcagcgtctgctgtgcctggtggattttagtagccgcctgcgataatgaaatgatatctgtaccgcgatgttctgtggtagacggtaccacggcagtctcgacgtgctcgctcgccgagggagtctgcggccgttcggcaacgatccccggatgaggagaagcggaataattttgaatattaagcataatatccccagttcgccatcaggagcgcgattaaatcacacccatgatggcgtatagatgacctttcagattaagcgcgaatattgcctgcgatagcagcgagtgcggatgctttcgactggttaatgctctccattgttttcagcatttcctgaatcaggctggtcgatttacgtgaactttcacgggcttcgtccgatgcggtgctggcaacccggttattcacctggctaatttgctgctcggaacgttcctgagtagcggcgtactgcccggacgcccctgcaataccaccgaccgtgaccgagttcttcataatcagatcgcccgtcatctgcatcttgcgcgcatcgattcgggtcatatccatggtattctgctcaagacgaatatcggattcgacagactcaagacgtttcgacagaatagcctgatgttcaggggagatttgtttattactgtctttaatacccagactttccgtggcgctggttccggcattagatttaagcgtcgcatcattaagatttttcgtcgcatcggtaccggttttcttcatatttaacgatttcagagaatcgacgccttcagcaccgagtttgacgctattctgcccgttcagcacgtttttaatactgtggctttcagtggtcagtttatcgatcttcgcggcattatgtttaagcgcgcctctttcattctgcagccccttatattccagtttggcgcccacgccagtgatccccaactgaagcgcgctctgggaaatactaccggacaacgcattcatcccttcgcgcatcatggagcttgccgtcgttttagctgcatcaaaactgactaatgacaacttaccagacagtttgctatcagcctggttcaacgtcagcattaacgtattcgcggcagccaacagcgcaacggcactggaagacattccgctaatatcaaaaaactttccgacttctgcctgctgctcgcgtaactgggtttgcacaacctcattcgctttagtcgtgacattatttgccagagcattcaaatcctgattcatgtcggtattttgaatactggcttttaaaaaggacgtgatcgttccgggggtttgcgttaatacccctggcgcaggcgcgctcagtgtaggactcaaccccaggtcactgactttactgctgctaataccaatactattcagaatatctttagcgctaacggattgcgaagctgtctgtgaactattctcaacagaatgattatttaaataagcggcgggatttattcccacattactaattaacatatttttctccctttattttggcagtttttatgcgcgactctggcgcagaataaaacgcgaagcatccgcattttgctgtaccgcagaagacatggctttttgcagttccgccgttaccttctggttttcaccaaatatttctacggattgtttaagccactgctgaatctgatccatggcaaaacgggcgagcataaaatcagcaagcgcctcgctggcatttttaataaatacgccctcggcaacaccaccggctgactgggctgcggtattcgtgacttccatgcccaacgccactttatttagggtattacctaccagctctttacttaaggcattcgtttgcaggcccatcttgctacccacattacccagaccgctagtaatacgttgcatcccctgggtaaagagtttgctgccgttttgcgccaactgtttcagcacgttaggcaccaacttcttaatcgtttcgcccatcattttgctcagcgcgttacccagtttcgccgccgcgcctttcccgacaactgcgaccaccacaatgaccgccaccatggcaatagcggcgacaatcgcaccaacaatgctgccggccatctctgccgttttcttatcgacgcctaatccttccagcgctttggtaatcgccttgccaatcagctccattaacggcttcagcacatgctccataatcgggtttagcgcctgctgaataaacgacactcccgtcgccgccttcacaatttcatcggccaccattaccgcaagtcccaccgcagccagcgccagactcgccccaccggtaaaaacagcggccacaacgctgacaatggttagcagcgcgccgaggactttcccgatacatcccataatgcggttcgtttcctcggctttgcgcgtctcttcctggaattcagccgatttcttttccatctccgcctgacgcccttcctgcaaggcgttgaaaagcgcaagatcgttttgcaggctttcttccgtatttttgcccacaatctcaataaacatggccatgagcatagtgaggcgggcgacatttgacagattatcctgctcaccctgggaaacctgattctgagaggcggcattagccgttccctggaatttggtcagaatgttatccgctttctcggctttcgctttggcgtctgtgcctgctttaaccgtcgcatccgtggccttatctaaggcctctttcgcctctgtcgcttcttttccggcctgttctaccgcggcttcagcttgtgcatagccggggtcagccgggtccagcgattgcaatttattttgcgcctgcgtcagttttttggtcgcagcgtcataaacactcttggcggtatccgtctttttgatactggcttcatagagatccgtcgcctcctgagcctctcccagagccgtctggaattctttcgatacctgaatccccatctctttttgtgactcaatcatcgcctgccataccgccagacgagactccagttgagacagcgaaacatcgcccagtagggtcattaacttgccaagcagtaatgtcaattgcccttcgctggagagtttttcccgggcggcgtccgtaggcggctttagacccaccgtattaatagcgctctcgccggactttgttccggctttaaggtcgcccgctttcgttgccaccacatctttaaaagctttatccgccgcttttaaaaagtccgtgttcttacgaacgccttcaaaagccgcctcagcgaggcgcggattttgggtatatccgctacggctaatgctacttgcgtcatttaccataattattccttttcttgttcactgtgctgctctgtctccgccgtttttagcgcctccagatagaccaacgcttttgcccgcagagactcatcttcagtacgttcattgacaagttcaaaacactgtctggcttttgctgccttacgcattaataattgacactgcccggtaaaaaaaacggggcgataatcatttttaagtaacgtaaacgctactgcataaaggtcacatgctttctgaaattgttttttcagttggcatactgccgccagtcccatggtgtaatcgggattgtaaaaatcataaatgcataagaaacgaaagaacgtctcagcttcatccagtcgtccctggttataaaactcataagcatgagcatataaaccgtccatcatatcttgagggatcccatgaacgtcttttagcgtggcgccttcactaacggcatcccaaatcatttccgcaacacgttcttcgctgacattattttgataatccattacttactcctgttatctgtcaccgactttgtagaacttaacgactgcgtttatctgatgcagttattaaaccccgacggtggttagtgaacattcaaaaaacgcccaatgaatacatcgctactgccttacgcggctcaatgccgtacctcgttttcttgtggctgaataacgtctttgcccgcgttttctacctcttccagccaaaccagaagacgtaaaacttcatcaatttcttccagactcaccagatcataacggcgatgggttttgaaaagactgcgcgccagtttgatatcgacgatcacaggtacgccaaccttctccgcataggcgcggacggccagtgcgcgctgattcgtttcatacaccgagatcatcggaatcggcatcaattcgggtttaaaataaatcccgatcgtaatatgcgtggggttggcaacaatcaggcgtgagttttcaatatcagatttcacctgttcagacagaatttccatatgaacttcacgtcttttagatttaacctctgggttcccttcctgctccttcatttcacgcttcacttcttccttatccattttcatatctttcatggtcaggaaatattccgcaatagcatccaataataagacaatcaatgcgcaagcaaggcaagttaataccaatgcgaggagaagttcacgccaaatgacggcaatacctacaatattgccatttagctgagaaaagatttcaaccttatatttcttccagcaaatgatggcggccaccacaaaggatgagagatacagtagggttttgaccgtatctttaaccgtgcgcatactaaaaagtttttttgccccttctaccgggtttaacgccgataaattaggctttaatgcttctgtcgccagcacaaaaccggcctgtaataacgccggtaatgcggaacacactaagcagagcagcataaatggaatcagatattttaaccctatcccaaaaacggccaaactgtagtcagccatgctctgatcaaaattatccgcaataatgatcttaattatccccataaactcattaaatgagccatacgacaccagataggcaattcctcccagcgtcaggcaggcgataatgagatctttacttttaaatgactggccttttttagcggagtcttccagccgttttttagtcggtttttctgttttattcgaggacatgcgtcgcccctcgctcgtaaaaccaactgcttaaccctgtggcctggaaagagagtcgcagtacattgtccggtagtaccggagagaaataaagcagcataattaaaacggcaataccgctttttaccgtcagtgaaatcgcaaaagcgttcatttgcggagcaaagcgcgacaataaacccaggaatacttctgacagcaacagcactaataccaccggactggccagaaccaaggcgttttgagccacctgattaataaacgttaatagcggcggtaatgaaggcgtgcactcgttcatcggatcgcatagctgatagcttttatttaacacgtcaaccatcgtgaccagaccgccgttttgtaaataaacgacagcggcaaacatattcaggaaattagccatttccgaggtatcaataccgtttgccggatcgatactactacttagcgttgcccctcgctggttatcgataatacaacccagcgcatgcataacccaaaaaggccatgacagcagacagcccagcatgacgcctaccgccgcttcttgcagaactaacgggatcatcgccaccgataaaaacggcggcgcctcgttcaatgcatgcggccatactcccaatgccaccaggatgataatggcgtttctcggcgcaccgcttaataccccgctattcaaaaacggcaggaagaaaaaaatcggcgccacgcgagcaaaccctagcgccgcagacgcaaccaggtgatgaatttcaaagtacaacgcgtaaaacattttttaccccttagccaacgccaggaatatcacctgacgcccgtaagagagtaaaacttcgccataccagccagacagtaaaaacaagcataaacacacgccaagtaatttaatgccaaaaggcagcgtctgttcctgtaattgcgttaccgtctggaataaccctaccaggaggccgataatcgttgcgacaatcgtcggccaccctgacaggatcaaaacaagatagagcgccttattacctgcaaacactaaatcatccatttaactatcccgtctcgtaatgatgtcatgttgcaatgtccatatactgtaatatcaatcccttagacagtaaggtccagccatcaagcgcgacaaaaagcaccagcttaataggtgtagatatcgtcaccggactcatcatcatcatccccagcgccagtagcacgctggataccaccaggtcgacgacgacaaagggcaaataaagataaaaaccaattttaaacgcgctttttatttcgctcagcgcataagcaggtaataacgcaaatattgaaggtttttcaatttcatctttgtcacgctttaccgtctcggtctcttctccatactgacgcttcagttgcgcgttttcaaaaaactgaactaactcgcgatctgaatatttgatcagataatcgcgataaccatccagaccttcatcaacgtgtttacttaatgatgaaatatcattaaaggtgacatcttcgtcctcaaaatagacgtaggcatcatgcattatgggccacataacaaacatagaaagcagcaatgcgacgccgttaagcgtcatatttgaaggtatctgctgtaatcccagggcgttacgcaccatgacaaatacaatagaaaatttaacgaaacaggttcctgacgcaataataaatggcaacagggtggaaaatgccagtaaggcaattaatgagatatcattccccattaccagactcgctcagccattcatggatctcaacgcctaaggtgtcattcatctgtaccagttcgccattacccagcaaaacaccattcgccataatttcaacgttaagttcagcattggtcggcagtgataatagctgttgctgccccatggcttcgagttcggcgagggtaacgttcttacgatacaaaacaaattccagtttgacgggcaattgattcaagccaggcagagtttctgcagtttcagttgtattattttcttcttcgatatgttgaatatctaacgtttccacaataattcccccttcaacacggttgaaatgacctaactttttcgcgtagcaataaacttccgcacgggaagtacgaatcaggagtacatctccgatcccgattcggcccagcaacgaacgctgcgtatcactgctaccgattacaaagcgcaacggccaacgcagcattttcggcctgccgcccccgactgcaggcagttcaggaagatgctcaaaccacaggccgccccgatcgctcataatgtgcaacaatttcccttccggcagcgcgcttcccggtacggggttctctacgcataaacgccgacaggacaaatgcggcacgggcaactcaaacggtcgctctgttgcagcaagccagggaacgaccaggtgctcagcgccagcagaaaccgccgccccagccagagcgggagagacatgctcaagccagtccccaggtttaatccaggccgaccaccgtttttctgcatcgctcaaccgaacccacattccctgtcgcgtcggatattccagcgtcgcttcccggccatggcgctggcattctgtcgcggtttgcgccaatagccattcgcgacgatcaatctgtctcacacgcaatgacatcaggcgtcatcctcctcgccagattgctgtctgtgctgttgctgctgcggattttgttgatcgtctcgcgtcaggtgccagcgctggggattaccgttttgccattgatcatgcaaacgatgttcaacctgcgtatttgacggtattaacgaaaactcccctgcttgccgcgcctgaatattgacggaatagtcatttccccagcgctgaaaacggtaagtcagcgagctatcctctcctttcacgccatcggcagtgggaaaaatagtcatcatcggctttgattgcgccgctaaaggcattttttcatcgccgccggttaattggctaagatcggcgatagtggttggttgcagcggaagctgagaaacatctttaacctttttatgatctttatcttcaggcttaccggtattggctgcggccattcgggcaggtgcgacatcccgcgccagcggcgcgccctctttacgaacgccttcgcccgcgatggctttattatccccaggcaatgccttgatattatcgtcagagattcccgtggcgttatcggttacttcactaacggattccacagcttttaaatcagcagataattttttaccgcttacgctttctaacggcctatttttagacgatagcaacgctgcggatttatctactttggcctccgcagagatcaaaccgacagatttttcagcagtgactttcaacagtttttcagcaatcctgagttcgctttttccgttatgatgcagaccagaaacgttgccattgtgatgttctgatttcgctggcgcgccatgtcgccatgccgccagtaataacggtaaagccgtttctttatgcattacgaaagcatcgccatagtcgcgatcttttttatcaccggaatattctgtcttatgtttttccaccgctttttttaatgcttctgataaaccgccaacctcatcctgctgcggcagtaaaatgttcccggatgaactgacagctgacacatcgcccattaaattatctcctctgactcggcctcttcctgctgtatctctcgctggatatagaatcttttctgacggattatccagcgttgatagttcccttctttgcgcaaccaatatttactttttttctgaaactcttcccttttcttttccagctcgctccgtttttcctgaatttgtataatctggagttctaaatcttttatctgccggcgaacaatagactgcttacgtaataacgtataaatttcctcacgactgagctgtctgttttctgcacgcagcgtatctaataacaatttcagacccgctatttgttcaaggatcgcctcctcctcggcctgcagcccgcggtcctcatcctgatagcgaagtaatatcgactcacactgtgaatgaaataccgtacagcgccgctgcaatactttaattctggtcagcgaatgcattcataccgctcaacgtgtcatcaaaggatgaatactgcgctaccggctggcataaccaggctttcaggctatcccgcatctgcatcgcccgatcgttatcgatattttcgccaggacgatattctcccaagtcaatgaaaagctggagctcttccaaacgcgtcattaatttacgcacggcagatgcctgttcagcatgtgtcggcgtcgtgacttgtccaaaaacgcggcttacgcttttcagtacatcgattgccgggtaatgtccctgcccggccagctttctgctcagatacaggtgaccgtcaaggatagagcgaatttcatccgccatcgggtccgcctcttcctcgctttccagcagtaccgtataaaaggcagtaatgcttccctcgctggtcgcccctgggcgttccagcaagcggggcaaattatcgaatacggaggcgggataacctcgacgagccggacgctctcccgacgccagtgccacgtctcgcaaagcacgcgcataacgggtcatggaatcgataaaaagcacgacccgttttccctggtcgcgaaaatattccgctacggttgtcgccagttgcgccgcattgcagcgatcgaccgaggggaaatcggaagtggcaaaaaccagcacgcatttttctttcttatgcgaagcgcgcaacatatccacgaattcagtgacctcacggcctcgttcaccgataagaccgataacaaagacatccgcctccgtttgctcgatcagcatatgcatcagcatggtcttaccgcatcctgcggaggcaaaaatgcccattcgctggcctacgccacaggtcaataacccgtcaatcgcgcgcacaccggtaatcagcggttcacggacgccaacgcgtgaagcgtaagacggcggtgcgacatcaataacgcgttcttcgctaatcggcgccacttcaggggtaaaacgctcaacgattttccctgtcggatccaacaccgcgcctaataccgagtatcccacccacgccgataacgcacgtccagtgggataaagcacgacatcgcggctcagcccctgggcattgccgataaggctcagcacggtgcgttcccgctgtaagccaaccacctgcgcacgtgcaacaacctgtttttggtgccagccacggcgtatttcacacagttcgccaatggccacatcgcgcaattccgcctcaataattgggccggttattttttgtgggtaggccagatattgcagtaaacgaggtgttttcatctcattagcgaccgactaaaaacttccagatagttgtaaaacccattcaaggcagtagagaacttttcaccgtcagataaaaaatccggatgcactaaggctttaagcgttagctccccattctgctcccccagtagtaattgcccgccgcgggcaaaatggcatccttccattatggtcattaagatttcataagcccgctgttgtaataccaccatgctgtcagcacccaattgcgcccagatccatacatcatcgtccttgacgctgatacagatacttggcaatgcaaataaatccagaacaattgttgaatggctatctattcctccaattaatgaaggatcgcaaccacttacttccagtgcggaacgaactaattcagcgatatccaaatgttgcatagatcttttccttaattaagcccttatattgtttttataacattcactgacttgctatctgctatctcaccgaaagataaaacctccagatccggaaaacgaccttcaatcattttcttaataaatcgacggacatcgacagacgtaaggaggacaagatctttatgtgcaatcaataaatcatccaacttaagtgtaatgagatccatcaaattagcggaggcttccgggtcaaggctgaggaaggtactgccagaggtctgacggatccctttgcgaataacatcctcaacttcagcagataccattactgctcgtaattcgccgccattggcgaatttatgacaaatataacgcgccattgctccacgaatatgctccacaaggttaatgacatctttttctcttggcgcccacaatgcgagcgcttccataattaacttcatattacgcacggaaacacgttcgcttaacaaacgctgcaaaacttcagatatacgttgtaccgtggcatgtctgagcacttctttaagtaaatcaggaaatttcgcttccagttggtccagcatatgttttgtttcctgaataccgaaatattcattgacgttgcgcgccagcgtcaccgccagacagtggtaaagctcatcaagcgcgttccgcaacacatagccaagctcccggagtttctccccctcttcatgcgttacccagaaatactgactgctaccttgctgatggattgttggattaataccaaaggacacgacttcatcggaataatttaccactcgcatcaaatcaaaatagaccgtaaattgttcaacacggatctcattaatcaacaatacgatgctgttatcgtccaggccctcgccatcgcgtaacaatacttccggcaggcgcacgccataatcaataaagaactgactacgtagacgctccgcaagttgagctttttccagatcttcacgccggctcttcggcacaagtaatatcaacggtacggtctctgtagagactttatcgagatcgccaatcagtcctaacgacgacccttctttttcctcaatactgagcggctgctcgcctttgctggttttaggtttggcggcgctacgttttgcttcacggaatttaaaatagaagagtacgcttaaaaccaccgataaaataacaaaaaccggcagtgggaatcccggcagagttcccattgaaatggtcaaaatagccgtaacaaccaatacaaatgggttgttcaacagctgcgtcatgatattccgccccatattatcgctatcgccatttacgcgggtcacgataaaaccggcactaatcgcaatcaacaatgcggggatctgggcgacaagaccatcaccaatggtcagcatggtataagtagacagggcggaggacaaatccataccatggcgagtcatccccaccgaaataccgccaataaagttcacaaagataataatgatgccggcaatagcgtcacctttgataaacttcatcgcaccgtcaaaggaaccgtaaagctggctttccctttccagtacgcttcgccgttcgcgcgcggcatccgcatcaataataccggccttcaaatcggcatcaatactcatctgtttaccgggcataccatccagagaaaatcgggccgcgacttccgcgacacgttctgaacctttggtaataacgataaactggaccacggtgacaatagagaagacaacaaaacccaccgccaggctatcgccaataacgaattgcccgaacgtggcgataatttcaccggcatcggcttcaatcaagataagacgactggtactgatcgataatgccagacgaaagagcgtggtaattaacagtaccgcaggaaacgttgaaaaactgaggattctgtcaatgtagaacgaccccataaacaccaatatcgccagtacgatattcagtgcgatcaggaaatcaaccagataggtaggtaatggaatgacgaacatagaaatgatcatcaccattagtaccagaatcagtaattcaggtcgtaaacgagcactgttaagtagagaaagcagcactataggtatcctgttaatattaaattaagacagcttttcaatagtacgacgctgttctgccatttcatgcttgtaggcaatatcggtcatactacgtaacgccattaacaattcttcctgccaatattcttcataaaagagtgaagagggtatggctttacatacttgataaaatatctgcaaaaaggatgcatgttctttatgactaagcaataacgcattcaaacctataatatcggctaacagcgaatccacttcatgtggctgttgcaatagcgaaagcatcagtagtaaccacgacgactcctccgcattaaacgctttggtaaacgaatacgacaacaatgtactcacaaacagtaggtcagcggagcgcaacattttaagttgcgtcaggcgtcgtaaaagctggccaaactccaggcgcgaacagctggcgtcattcgcgtcaatatcggttaatagcgaaccctcaataaaatccagtaccaccagtcgacgttgatagccataactggctatccagtcagagtaaatctccacttcatgtgattcactctggataaattgccgatagctggcgcgcaataagcctggttttaacgataatgttttcccaaaaagccgggccttcaacgcacaattaatccctgccttgagggtcttcggatcggtttgctcttcaacgtgcttaagtaacgactccagctttttccgcacgatctcttccaggtctttacgacgaagcaattcgcgtaacacaaggactaaatcactggggtcaggaaataagctacgcgcctgacgtaaaaaatcttctaacgcgccgccatgtacgctaattagctttaagatttgcttcgccttcggtaaagcctcatcctccagcacgcgttcaaaactgttagataaattactggattttttttcataatcgcgacggttacgaaattgcgccagcgccgctgacatttcgtccgtcgactggacaaatttttgtacttccgcccctggagacgaatcctctgcggcctgttgtatttccgcctgttgcgcatcagtatgctgggtcgcatcctgatgagatgtctgccgggacaatattctggaaaatgaaataccggaggttgagccaggaatcatttaattgcctcctgacctctatccagataaacacgaacccatttctgtaacttatcgtccccactccaggcaccgctttgcttcagaatattgtttaccgattcgctggcatccggcgttaacgggtcgacaatttcttttggttcaatcatgaacacacgaacaacattacttttattcttactggaataacggaacaggctaccaataagcggtaatttgcctaaaaacggaatactttggacagtatcggtatttgcatcccgtgtataacccccgaccagcaaactttttccgtgcggcactctcgcaatagtgctaattaacgttcgcccgacttcgggtaacgcatctacggaggtggtagtatcagattgcggcgtcttatcgttgccatcttcaatgtccagcgacatttctatctgaccatctgcggaaaaacggggcagcactcggatcattgttccgtatgttacatgctcaagcgccacattacgttccccaatcagcttggtgtaaaacgttctgttgttatcaaaaatagcgggaacattttcctgagtcagtaataccgggcgcgaaaccaccgtcgcctgtttcttctcttctaacgcattgaccgcggcgatgaatcgactgccatcgagggtacttattgaagactggtttaatgacacgccaagtttgtccccaatagttatgctgccgctccatgaagtgcccaaacgctccagatcgcttttattaagatcgacaatccacagggataattctacgtgacgtttggcgacatccagcgctttaaccagcatttcgataaaatgcacctgctcagccgttccctttactaacaaactgttggtatccggataggccacgattttaatattgcccgccgcggcattttgctttaaagcttcctgcagactcatgccaccggcataatttgctgctttacctttttctccattcgctgaaaacgctggcatcgccgggggttcgctactgacaatattacctaagggttgctcttctccctgcaataacctttcaatggccgtagcaataccgggaataaccattttctgatcgcgcagattataggtacgatcgcccacgaaggtattgttcagacgcatcacccctattttctggcgtcccagctcaataccatcgttttgcttgtccatcatggtggcggcgttgaccaccatatcaacatagacgggtggccctgaaacatagaatgttcctttacggttatcgccacgtagcgggtaatttttgttatataaacctgagcgttttagaaaattgttgaactcattgagtgagacgttgcgtaaagaaaccacggcattgcgcatttcactggcgtcataaatatagatagcctgcccatcgaaataccaaatcagccccagttgtagggaaagcttctccagtaatgcgttaggatcgtgaaactcaaagttgcccgtaattttttttcgtgccgccattttgctaacaatgacaggctcctttagctgtagcgccatggcatcgaaaaatgtccgcaggctatcgtctttcgcaacaaacccacttcccgttacaggtattttttcactagaataaccaggtgtaaccagaacaagcgcggcacatgccagcactctggccaaaagaatatgtgtcttcatttgtctgccaattgaataatatttgataatttccgcggcgaaacgccgatcagctctttgatctcactagaaaaatgtgaaggcgatgagtaaccatgattaacggctaattgggtgatgttctcgtggccttctacactattcagcagcgattgcgccatacgccagtttcgtaattcactcttcgcttttccgcccaacgctctgctgcacaaacgacgaaaatgggtataagaaacgccatagtcttctcccagcattctcatcgtgttgccgctggttgactgagcgagtaaatagccaaccaaccagtaactctcgctttttcgtaacagcgccagtaccttattgaaggccggagaaggcgtaataatttgctgcaaaaaccagtactcgcagcgtttacgatcttgccaaatagcgcgaaactcaggactcagcaaaacccatttatcggattcagcatatgtcgtgtccactaatcctgcgccatcgataaatgccagtaatttgctgagtacttcaatttttaacggtcgaaaaaccaggtctcctgatactggtgcgacaacggcctgctcgcaaaaaagcagcgcgccttcctgaatcaggcaattttcattgtgtcggctttcagaaaatgacatatgcagcttttgcgcggaacacgtctgtataaaccatgcttccgggctgcggattttccgcttctctccttctttaagtacttcctgcgtatttagcatagttgtcagcaccagttaaaaatcattttaatatgtaaacaataccgggagcgggtggcaaaatcctgatgcaatcattatgaaactgatgccgcccgctaattaaattggccaacttgcatagtgtttgctgatttaaaatagaaaattagctcatagtgtataaattctggcttattgttctgcagcagcaaaaattcagatattgtcatctggatggagaattaattatttatatcaggagttttttttgctagcattcctgaaacgcattcgcccccttataactattgtcagataacgttctgacggttgtgtaaaaacatggcgcctcattcttctgtagttggagttaatatgaaaaaattttatagctgtcttcctgtctttttactgatcggctgtgctcaggtgcccctcccttcctccgtgagcaaaccggtacagcaacctggcgctcagaaagagcaactggccaacgcaaatagtattgatgagtgtcagtctcttccgtatgtgccgtcagaccttgcgaagaataaatcattatcaaaccataacgctgataattccgcatcaaaaaatagcgcaatcagctcaagcattttttgcgaaaaatataaacaaaccaaagaacaggcgctcaccttcttccaggaacatccacaatacatgcgttcgaaagaagatgaagagcaactcatgaccgaatttaaaaaagttttgcttgaacccggaagtaagaatttaagcatatatcagacgttacttgctgcccatgaaagactgcaagccttataaggccatatcaccgttggctgaactcatcatgatataattaagaccatattttgcattgccacttaatatcaatataattattatagctatggtcacttttacggttggccatttgtctcttacgttgcatttatcaatctgctttttgatacagcagcacctcgctgctgctttttttatttgtgataaagaacggcctcccagacttgggaaatagccgaaacttatactgacaaactatcgtctcgtatatcgcgataaactgacatccccctcctgccccacatgttggcattcttacgataccccatccacttttcgcggataacgctctttttacccgtgacagcgtattgacgaccaggctagtatagcggcagaaacgtcccgatgcctggaatgaatggcaaacagtctataaggtgattgaatggatacgacagaagaactaaacggaacctacttctaccacggacaatcgaacctgtcagcaggtgaactatttgatgtaattttcattgagcaattttgtgatgaacttgggattggcattgagtcaggtgctgctatcctcgccgggcaaccgtggttaaaaaccagaacgaaaccgggagaggcaatcaaagggacaagtgttatctccaggtatgggagaatgcttttacgaaatgcacgaactccttttggtattagagttcctacacccgttggtataagaatgcgaaaaacaaataatcttgccgcagtcatagcacgatatgttccatggttaggttgggttggtcttgtgaattcaatttaccaggtatcaaggagaactcaggcaaaatacaacctaatagcacgccctaaagatcgtatacaatggacatccttttgatggacacaattcagcaagaggtgttagcactcttccgtgaagagattcccggatatttagacagcaattggaaagaaatcccattagaacttgattctgatttatttgaagctccaggcgatgacctgcatgaagctttggataaatttgaaaaaaaatttaatgtagatttatcacaagttaaatggtcgtgttatttcccttgggagaatactccactgcttacacgatggtttaaattaaaacgggaagatgtagaacgaactcgtaagcctttaacaatcagaatgttttctgaatcagcgaaagctgggaaatggctttatgattaatgaaaaatatgtcgaattaatcaggagctaattactatgaattttgttaatcgattaaaattaaaagtagtaaatttcatatacttttcaaattaaaataatgtgttgtatctacctttcgaccaccagtaactctgacgccatccgttttaaattgaccatttggttctggtggtatatcgcaagtagatatttctgaagtgcttgactattcactcttttttagcctgcatgtatggtggcgacgatgctgttacataggtaccggtatattaccaaattgattctgccagatatcccgcctcacgtagagcattcataattttattcgctaattcatactgatattcatacgaggtattctccatggaaaataccgttaattcatatttataatacagccaaccatcattctcatttatcaacttaggattacagtcataatttctttctattgtaatcattgtattttcgtatcttaaatataataagttcacttttattatgtctggaatcccttgggataaaaaatcaattaactcatatttatccagatcagactcaacaacgattgtgaattcagagttaacttcttccattatggaacctcaatatatgggcctctattaaacggtgatgattgtttcattaccgatacctgtatttttgttacatcatccggatgaaagtgtaggatatacatcctcccatatgccaccttcatcaccagggcctaatgcacgccgttgagcctttgttgatttttaaccttctgatcttactcagcaatagtggacacgcaactaagtgagtaaacgctcaagcaagaggtgactcacatgacaaaaccagcatcaaccaccaataagccacgcaagcagcacacgcctgaaagccctgaaactggcggaacgcattggggtggccgctgccaccagcgagcttaacctgtataaatcacagatctacagctggcgaaactcagctctcttcttctgaacgtgagcaggagatgtccgccgcttagggttgtgtccctattacgcgggtaggatcaatcaagcagttacggcaaaaaagagaatcatggatatatttagcaaactccctgatgatacgtaatcagtgagattaaaataatgcaatcgcgataaaccgaagttaatcccctgtttaaagacagtgagcgaccttcttgccatgcctggactatatcagcctcatatgtacgccttgaaagcgtacagatatgtattataattgtacatattgttcataaacaggaggatgaaaaccatgcctcagatagctatagaatctaacgaaaggctgtcgttacgtgtatcgacggatgccaaaaagttgatagtccgcgctgcggcaatccagcaaaccaacctgacggattttgtggtcagtaacatactacctgtcgcacagaagattgttgatgccgccgaacgggtatatctgacggagcgcgatactaaaatgatcatggaaattttagataacccgccagcgccgaatgaaaagcttcttgccgctgctttcgccctgccggacatgaagaaatgatgtttacagactggcatgaggccgcgatagggaaaacccacaatcgaatgaattttgattgtggggatgccgatctgaaccaattcctgcaacgccatgcacgacaaaatcatgagaaagggacaacgaaaacctatgttgcgcttgataattcggatgttacacgtatccacggcttttactcagtcagtcctgcatcactgatatatgcacaggttcccggcgcaatcagcaaaggattagggagatacgatgtgccggtgtttcgtctgggtcgtttagccgtagacaaatctatgcaggggcaagggctgggagcacaacttttgttatctgccggaaagcgttgcatacaggcggctttgcaggtcggtggcgtagccctacttattgatgccaaaaataaacaggtctgcgactggtacaaaggatttggcgcagtaccattaaacgatcaacccctttccttgttgctgtcgtttaaaacgctttatgctgctttatctgcatctggtaggttatgacaacatgaggctttgttgaataattcagaatcggccaacgataaggatacaggactcccaccggagcactcgttatacgagcctgacgctggtcggcattgccaacaacgtcatccggttcagcgctttgaccatcgccatcgcttcacccacctgcgcgtcatagttccgcaggctcagatggccgcccagcaaggttttgatacggaacatcgctgtttccactactgaacgacggtgatagcccactttcttttccagacctcattgctgccgctccgatgttgattttaaacttttgctttgccatcggaacccgatgctgaaacgacagtaacgattagatccgccaatctctttattcaacaaagccccttcgggatagagcttccgctgagcgggaaagtatgcctttgcaattaatcaataaagtgttgcgcgagaaatcgtgcatctttcaagcacatcgtctactttaattaaccgattcataaaatatatattatctgttcatttctagcctgtaggatattttaataactgtatattttaaacaataaaaattaatattggcctacttttttgttataataccagactccaaaattgtgctataggaacatcatggaattaattcgttatgctgacatcaacagcgatctctatcgccacatttgggtcgttggtgatattcatggatgttactccttattgttaaccagactggctcaattaaatttctctcctgataccgatctcttgatctccactggagataacattgatcgaggaaaagaaaaccttgaaacactgagactgttaaataccccatggtttatttctgtagtgggtaatcatgaagctatggcgcttgacgcttttgaaacacaggatggcaatttctggtatgtaaacggtggttactggtacgactcggtcaccgaaaaagacaggcaagaagccactgagctattactaacttttaagcagcgtcctcacatcatagaagttgaaacgtcctcaaagaagtacgtgattgcccatgccgattatccagatgacagctacgattatgggaagcaagttgatattgatagcgttctatggtcacgcgatcgtctgcttggttcgttacaggggaatatccatccaatacgcggtgcggatacttttatcttcggccatatgattgttgactacacaacaacattcgccaatcaaatctacattgacaccggttctttctgttcaggcaatctgtctttttttaaaataaagtaatctggaaatagaattatataatatcaaccctccctgcattatgggcaatgatatagccttcaataagtaccattgcccattcgtaatagcgtctaaatttcgcgtttttctgcccatttcagcattaagatcgcaggccaaaaaaacgaagccgtaatccgacgcaggtagttactcgatcgcctgagaagagtaaagatcgcacagctccagatacctatcggaagaaaacgcaataaccgtggtggcgaaatggatcggcttgccttcatgcaacacaatcttgattacagtctcgagttcggaagcatccgtttccctcttaattttgttgaaatttctctttgttgcgagcatggtctgaactaattgcctggcagcttgccttgtttcgtcaatatttggaaaatcgaacacatttccaacttttactttcaagacagaacttggcttcctaccctcactgacattacgatctgacgaggctactcttcgctggattacgtaggtttttttcgtcaaactggcttttaccccgaaaccagcaggagcttctctgtggtcatcgaaaacagtgtagagtttttgagctgggttagcttcgaaaacgatttttccagagcgactgagtgcaggcttaacattgatacttaacttgttgataatgaaaggctggctgagagttgttttcaaagtatcacccctgttgtagtccaggaatgatgagaatgtaacctgtcacattttaggctacaggtgagctacaaatttatgggtttatgtgagtttataagggttttacctggggccacatgagcacttgaaagaataaaaaaacgagtaaaatcaatatgaatgagtcatttgataaggacttctccaaccacaccccgatgatgcagcagtatctcaagctgaaagcccagcatccggagatcctgctcttttatcgtatgggagacttttacgagctgttttatgacgacgcaaagcgtgcgtcgcagttgctcgatatttcgctgaccaaacgcggcgcatcggctggcgaacctatccctatggcgggtatcccgcaccacgccgtagaaaactacctcgcgaaactggtcaatcagggcgaatccgtcgctatttgcgaacagattggcgatccggccaccagcaaaggtcccgttgaacgtaaggtcgtgcgtatcgttacgcctggcactatcagcgatgaagccctgttacaggagcgtcaggataacctgctggcggctatctggcaggatggtaaaggttacggttacgccacgctggatatcagctccgggcgctttcgtctgagcgaacccgccgaccgtgaaacgatggccgcagagctgcagcgcaccaatcccgccgaactgttgtatgccgaagattttgctgaaatggcgttaatagagggacgccggggtctgcgccgtcgcccgttgtgggagtttgagattgataccgcccgccagcagttaaatctgcagttcggtacgcgggatctggtcggtttcggcgtcgaaaatgcctcgcgtggattatgtgcggcaggctgcctgttacagtacgtaaaagatacccagcgcacctccctgccgcatattcgttccattacgatggaacgccagcaggacagcatcattatggatgccgcgacccgccgcaatctggaaattacccagaacctggccggtggtgtcgaaaataccctcgccgcggtgcttgactgtaccgtgacgccaatgggtagccgaatgcttaaacgctggctgcatatgccggtacgaaataccgacatattacgtgaacgccagcagaccatcggcgccttgcaggacaccgtcagcgaactgcaaccggtgctgcgtcaggtcggcgatttggagcgtatccttgcgcgtctggcgctgcgcaccgcgcgtccgcgcgatctcgcccgaatgcgtcacgccttccagcagctgccggaattgcacgctcagcttgaaaccgttgacagcgcgccggtacaggcgttgcgtaaaaaaatgggcgatttcgccgagctgcgcgacctcctggaacgcgccattattgacgcgccgccggtactggtccgcgacggcggcgttattgcgcccggctaccatgaagagctggacgaatggcgcgcgctggcggacggcgccaccgattatctcgatcgtctggaaattcgcgagcgcgagcgtaccgggctggatacgctgaaagtcggctataacgcggtacatggttattacattcagattagccgtggtcaaagccatctggcgcccatcaattatgtgcgtcgccagacgctgaaaaatgccgaacgctacattattcctgagcttaaagagtacgaagataaagttctgacctcgaaaggcaaagcgctggcgctggaaaaacagctatatgacgaattgtttgatctgctgttgccgcatctggccgatttacagcagagcgccaacgcgctggcggagctggatgtgctggttaacctggccgaacgcgcctggacgctgaattacacctgcccgacatttaccgataaacccggtatccgtattaccgaaggtcgccacccggtggttgaacaggtactgaatgagccgtttatcgctaacccgctcaatttatcgccgcagcgccggatgttgatcattaccggccccaatatgggcggtaaaagtacctatatgcgacaaacggcattgattgccctgctggcctatatcggcagttacgttccggcgcaaaacgtggaaatcggccccatcgaccgtatttttacccgcgtcggcgcagcggacgacctggcctccgggcgttcgacctttatggtggagatgaccgaaaccgcgaacattctgcataatgccacggaaaacagtctggtattgatggatgaaatcgggcgcggtacctccacgtatgacgggctgtcgttggcctgggcctgcgcggagaatctcgcgaataagattaaagcgttaacgctgttcgctacccactacttcgagctgacccaattaccggagaaaatggaaggcgtggcgaacgtccacctggatgcgctggaacacggcgatactatcgcgtttatgcacagcgtgcaggacggcgcggcaagtaagagctatggcctggcggtcgcggcgcttgcgggcgtccctaaagaagtcatcaaacgcgcgcgccagaaactccgcgagctggaaagcatctcgcccaatgcggcggcaacgcaggtggacggcacgcaaatgtcgttgcttgccgccccggaggagacatcgcctgccgttgaagcgctggagaatctcgatccggactccctgacgccacgccaggcgctggagtggatctatcggctgaaaagtctggtgtaaacgtgtcagacccgatagcgccgcgctatcgggtctgcgcgccggaacaggcttttcaggctgtgactgtcgtttcgtgtaaatgacgccagactatccgtcctctttccctttttaaaatgaccgtcgaccagcgtaccgtctcggcctggcccggcagttgctgtcgctcacgataacgcagcgcggcgccttccggccactccgccacaaggtcaatgtgctcaaccacgataaccagacccgggcgacacgcgcgctgcgcctggaaaaaagcgcccagcgccggataatccagacaaacaccgcctggcgttatcatcgtaaaatcagcagcgaaacgcgctatcaacgcctccaggctacccacccccttactaagccagttctcaatcgccgcatgggcatgaataatttcttctttatatggattcatgatctttcctttttcaggcacagaagcgcctgtctattgtttagacagacagcgtaaataaggggcagcagggtgataccggcggcggcaataaaggtccagcgataagcaacctcaagcgacataacgcgctggagcgcatttaacagcagcgtcaacagcgtcgcgccaaggaaaaagctgatctgacgattaagattccatagcgcgctggcgtcaggcatgtcccggcgagcaatagtcaggaaagcgccactctgcgcggtactgctgcacaaactgccgccagcgcccattaaggcgaatatcatcatcagtacacggtgcgatgtcgcaggcgtaacgttagttaaaagcagtatccctgcggcctgaagaagacagccgacgataatcagcggacgcggcccaagccgattgaagtaacgtccggtaagcataatggcgacaaatgaagcgatcgaccaggggatcatcagcgaccccgccgccgcaggcgatagctgcgcgacgttctgtagataaaacatcccgaccacgctgataccaatgaacatacccggcacacacagatagacgatcatggcaaaacgcagcagcctgtccgtcaacaacggcagatggagcaatcttgctgacgccattgtcgtcgacgcgacattcagccaacgataagcgagcaataaggtgagaacggccaccggcagcgtggcaaagaatatccagcgccagccgcacgtttccaccagcagcccgccaatcgcaggcgaacatgccggcgccagtagcgccaccatcatgacaaccgatgacacgccagcgcgttcatgcggtttaaactgttgccaggttaacgcctgaccaaccgggatcaataagccaccgcccgccccctgcacaatacgccagaaaacaaggctgtgtaatgaatcggcaaaacctgcggcagcggcggcaacgctaaacagaatgagcgaaaatatgatcagccgtcgtgcgccgagataacgcgaaagaaacgcgctaaacggaacgatcagcgttaatcctgcgatataaccgttactcacccatgccagcgccgatatggacgtatgcagatccacggacatcgcaggaaaagccacgctggcaataaacagattaatcagatcaagaaagaagccgagcaggtaaaccactgccactttactgcgatacgtcattatgcatcctccgtcagaggcgctaatgtagccgtccggagaaagccagataagtccgcgcttcaacgatatactgtcaaaataattttgacagtaaaggagctcgccatgctcaatttgcagcgtatgtcgctgtttatcgccgtggtagatagcggcagcttcacggccgccgccgccgcatcgggccaaacaaaagcggtagtgagttttaatattcggcagcttgaaaaagagcttggcgtaacgttactgctacgttccacccgacgattgacgctcacagacgccggcgtcctcttttaccaaaaaggcgtgaatttactcaacgcagcgaaaaatttgcaggatgaagtgcgtgccagccatagtgggctgggcggcgagttacgtattaccactacgcccgagtttggcgaacaggtgatcattccgttactggcgcagtttagtcagcgccatcccgatctccgtattcggcatatgtcctcatcacatcatgccgatttaattgccgagcgctttgatgtggcgattcggcttggctcgctggccgactcccgctatcgcgccgcgctgatatcccgctttaccattctgccggtcgccgcgccgcagtggctcgcccgcaaccccgtgtcgtcgctggagtcgttggctcaggcggaatggattattcatgagcgattacctacgccgctacggtggacagtaacgagtaatcatggccaacactcacgcctggagataagcaaagccggcaaaatttctgtcgacagcgcgcgctcgctgatggccttcgctctcgcgggaagcggcgtcgcattactgccgcaatggttagtcaacaccgcactggaggatggaacgttaattcacgtgttacccgactatcattttccccgtcagggcatttatgccgtttacccggacgcccgccatgtatcgacaaaagtacgcgcatttattgattttttacgttcgcaatgggattgcggggagcacgccccatcatcgtagccagtccgggagcattgcgctcccggacggataatactgtcttaatccttaactaccagcttgtctttgatcccctgcgcctgccaacgcacccacagcataattgccgccagaacaacaatcggcagtaacggatcgagccaactaccgccggaaccgaacagcaggttaatcagcaccacgccggtgccgccaatcgcccaggcaatggtcgtcggtacagaccaaaccaccatctgctgtttgacatcagagacgcccatcatgcggttaaccacccagaacaggctatcgttgaagtagccgaagaacagcgaccccatcgttgcggcctgagcggcaagcaacatattgatgccggggatctgcgccaggatcggcgcggaaatcgaggcggcagtgatcatcgccaccgtccccgatccctgaatcaggcgtaccagcgtcgccacgataaacgggatcaggatcggcgagatcggcaggttggcaacctgctccgccagctgttgccccgcgccgctgtcgcgcaggatcgcgcccaacgcgccgccagcgcccgtgaccagtaagataatcccggcgctttgcaagccctcttccagacgctctgcggtggtatgtttatccatgcgcggcaccagcgtatacaccgccagcagaacgctgatggccaacgcgatcaccggacttcccacaaagttgattgcctgtaccaccggatgcgtcgccaggccggaccatccttctacagtggcgagggtggaacagatagccttcaggaagatcagcacgatcggcaccacaataggcagcagagagagcgtcaggctcggcagatccttttgctctttctctttattgtactgctccagcgcggcattgacttcatcggcgttcagcgtgcgcggcacgaaatcagggtagcgtttatccagccactgcgcatagaacacaatgccgatcacacagggcaccgccagcgccatcccggtcaataacattgcgccgatgtcgacgttaaaaatcccggctacccccagcggaccgggcgtcggaggtaccgtatggtgagtgaccaccagcccgcccgccagcgcgacgcccagcgtcagtagcgaacgcttaccgcttttcgccagcgctttcgccaccggataaagaatgacaaaagcggaatcgacgaaaatggggatgctgacaatataacccgtgatcgccagcgcccactcttcacggcgtttccccagccatttgataaagctccaggcgatacgctccgccgcgccggaaacctccagcaagcgccccatcattacgccgagaccaatcaccaggccaatgctgcccagcgtcgtaccgaatccgctggtgatgacagagagcgttttatcaatgcccattccccccaacagaccggcaatacaggccgccgccagcatcgcgatcagcgcatgaacacgggtgcgtaacaccagccataccagcacgaaaacggcaacgatcagaccgataattggggtcggtaaacttgtcatgacctcccctccatatcatcttgtcgaaagcgttcgataatgtcatcgaagcgtttatcggcgacaaaacctaacgccagcgcacgctggttatcgatacgtcccggccaggaggcaacaattttctcgacgccttcgtcgcgctgatgcgtaacccgatcgcgcgccgcctggccgcccgcctgacacaacgtttccagcatctcgcccacggttacgctgatcccgggtaagttgatgctgctcgcctcgccaggcgcgggtaacgttgcggccagcgacaggttatggatcaccgtcgccgggctggaaatccacagccgcaaactttccgacaccgggcagacggtcgtctcgccctgcaacggttcacgaataatcgcgctgacaaaagaagaagcggcgcggtttggtttacccgggcgaacacagatcgtcggcaaacgcagcgccagcccatccacatagcctttgcgggtatagtcgttgaccaacagttcacaggcggccttctgcgcgccataagacgagcgcggcgtgagcgcggtggtatcggtgacgcattccggcagcgtaccgccataaacggcaagcgagctggagaagacaaaacgaattttctgcggttgtcgacgacacgcctcaagtaactggcgggtaagatccaggttaactttccatcccagatcgaaatcgtcttccgcatgactgctgacaatcgcagcgagatgataaacaacagaggtattagcggtaatcacactctccagcacgcccggctgggttaagtcagcctccaggcagcgtaaacgaggggaatctgataaccgtgcaggcatttttaaatcaacaagaagcagttcgttaaacgccagcgatgagtttaataaggcgcttgcgagtttctggcctaaaaagccgcccccgccggtaatgataatctgcatccggatgtcctctttattgctgtgtagggtagttcagggttagcgccaggcgttaaaccagccaagcccgtcctgagtggtattccgtggttggtattcgcagcctatccagccgcgataacctacgtcatcgaacagccggaacagccatgggtagttgatctcgccatcatccggttcatgtctgtccggtagcgaggcgatttgtacatgggcatagcggcccgcatactcgcgaatcaggtgactcaaattgccatccactttttgcgcgtggaaagtgtcgagctggatgaacacattcgggcggtcaacctcttctgcgatgcccagcgcctgatattggctggaaaagaggtagccgggtttaacgccgggactcagcgcttcgatcaaaatacgtttatcgtgggcggcaaaccggtcggcggcataacgcaaattatcgataaacgtggcgcgataacgtgcgccatcagcgccatccggcacgacgcccgccatgatgtgaacctgctcgcattccagcgccagagcgtattccagagccagatcgatatcggcgcgcgcgtcgtgttcgcgccccggtagcgcggcacgtccccattcgcccgccgcggtatcgcccgccgaagtattaaacagcgccagcgtcagattatgacgcgatagctgggctttaatctcgctggcggcaaagtcataggggaacagaaactcaacggcctgaaaaccggcttcagcagcggcggcaaaacgctcgataaacggcgcttcggtaaacatcatcgacaaattggcggcaaaacgcggcatcgggttatctccttaactgcgcaatttcttcggtggttaaataacgaatcgggcgttcgccaaggataaaaatcagctttgccgtctcttccagctcctcggtattattagcggcttcctgcaaattctccccgcacacgaccggcccatgattagccagtaaaaaggcctgatgccgggccgccagcgcagccaaatcgcgggcaattcggtcatcccccgggcgatagtagggaaccagcggaatgtcgcccatccgcatcaccacatagggggtaaacgggcgaatcacattttgcgggtccagcccttcgagacaggaaagcgccgttgaccaggtgctgtgcagatgtatcacggccttgcagcaagggttattgcgatacaacgccagatgaaaacgcacctctttagacggtttatcgccgctgagccattcgccctgcgggtccactttggatagccgctgcgggtcgagattacccagacacgaaccggtgggcgtcgccagaatattgccgtccggcagtaacagcgagaggttgcctgccgagccggtggcatagccgcgctggaaaaacgaggcggctatcctgaccatctcttctcgcaaagcgtgctcttcttttgccagtatcgtcatacctgaaactccctttgagcgcggatgaaaaaggattcatcgccaaaattacctgactttagcgccagcgagactggcgcatggagcgcgttgacccacggcacgccgggtgaaatgcacggtccgatgtgaaaaccggtaataccgaggctttgcgtcaccacgcccgaggtttcgccgcccgccacaataaaccgggtgataccgctttccgctaagcgagcagccagcagggaaaagagcgcctctaccgcatggctggcttcggtagcgccatattgctgctggatggcggccagcgcctgcgtggaggcggtggcgctaatcattggcgccagttcgctgtcctgactgagcacccactgcgccagcgcttcagcgtaggcctcgcgcgtctcggatgacaggcagcgcgccacatcaacgtcgcgtgtgggagcatgttgtcgatagaaagccacctgctgattcgtcatttgcgaacaggaaccggaaagcaccaccgcgcggccgctcagcggatagcctgcggaacgggcctgagaaacgccgtgcttcgcccactgacgcgccagccccattgccagcccggaaccgccggtcaccagcggagcatcacgcaaaacctcgccctggatttccaggtgccgctcattgagcgcgtcaagtactgcgtagcgatatccttcctgctgtaaacgcgacagcgccgcacgggtcgcggcaacgccttcatcaagcgtctgagctggaataacgccgcagcgcccttgcgcctgcgcttccatcagacgcggcaggtagctgtcggtcatcggattgattgggtggtggcgcataccggactccgccagcaagtggttcatgacaaacagatagccctgataaaccgtgcgtccgttaaccggcagcgcgggagaaatcacggtaaatgaggtatccagcgccaccatcagcgcatcggtgaccgggccgatattgccttcggcggtactatcgaaagtcgagcaatatttgaaatagacttgctggcagccctgttttttcagccataccagcgccgccagcgattgttttatcgcctcttgcgccgggcatgagcgggttttcaggctgataaccaccgcgtcgcacccttccggttgcgtcccggttgggacatcattgatctgcactgtcggcatcccgttttcgaccagaaaactggcgatgtcggtcgcgccggtaaaatcatcggcaatgacgccaatttttaacatgacggctcctcaggcgtgacgccaggcagagtaatccccgagaaaattttgatcacagcgctgtcatcctctttgccataaccggcgttactggcgctggtgaacatatttaacgccgtagaggccagcggtaaggggaagcgcagcgctttcgccgtgtcggcaaccagccccaaatctttgacaaaaatgtcgacggccgaacgcggggtatagtcgccgtcaacgacatgctgcatacggttttcaaacatccaggagttgccggcggcatgggtcacgacgtcatacatcacgtccagaggaataccggcccgcgcggccagcgccatcgcttcggccgccgccgcaatatgcacgccagccagcagttgatgaatgattttgacggttgagcctgcgcccggcgtatcgctgatgcgataaacgttgctggcaacggcgtccagcacaggcttcaggcgggtaaacgccgcctcgctcccggaggccatcaccgtcatttcgccctgcgccgcttttactgcaccgccggaaaccggcgcatccagcatgttaagattcaatgccgtcaacgccgcggcgatctcttgcgcgtcggcgcttgagatcgtggacgaaaccatcaccgcgcttccgggtttcatcagatgggcgacgccatcctcaccgaataacacctgtctgacctgggcggcattgacgaccagaatgactaacgcatccacgacgccggcgaactccctggcgctggcggcagccccacaagccccttcagcgagcagattcgcgcacgcttgcgggttaagatcggccccccatgtggaaagcccggcgcgcaggcatgaacgcgcagcgcccattcccattgagccaagccccacaatgccgacatgaaaatcggttcctgttgtcattatcactccatgttaatttacgtgatattatgttttgttatgtgaatataggcgtttttgtaaacaattacggtgagttgtttcacaaaaaataacaaaatgtgttattttttgtgaaggcaatcctcatagaacttcacacgctgtgacgagaaatcgcgtaaaatcgcgacaggactaaagaaaggagcagacgttgatacctactgagcgtcgacaaatcattcttgatatggtagcggagaaaggcatcgtcagtatcgctgaactgaccgagcgcatgcatgtatcccacatgactatccgccgtgacttacaaaaactggagcagcaaggcgcggtaatccaggtctctggcggcgtgcaatcatcgactcgcgtggcgcacgaaccctcgcatcagatcaaaaccgaactggcgacgccgcagaaagcggcaattggcaaactggccgccagcctggtacagccagaaagctgtatctaccttgatgcaggtacgaccacgctggcgattgccaggcagctggttacgatgaataaacttacggtggtgacgaatgatttcgttatcgccgattacctgatggacaatagcaattgcacaattattcacactggcggggcggtatgccgggaaaaccggtcgtgcgtcggtgaagccgcggcgacgcttttgcgcgggctgatgattgaccaggcctttatttccgcctcttcctggagcgtgcgcggtatttcaacgccggcagaagataaagtcacggtgaaacgggccgtcgccagcgccagccgccaaaaaattctggtgtgcgacgcgaccaaatacggccaggtcgcgacgtggctggcgttaccgctggcggaattcaaccaaatcgtcaccgatgacggcctgccggaaagcgcaattcgggcgctggccaaagtggatatctcactgctgatggccaaacaatagcgaagcggcgcaagccgcttacgtcatcatcttgcgtaccagttgcgtaaactgttcgcgttcttcagcgctcagtcgccccaaaaactcatcgtcaacgcgatcccccagtggtatcgcggcggtgagcaacgtttggccctgaacggtgagatagacaaaacgccgacgtttatccagcggatcgttttctcgttttaccagcccacgattttccatccggcttaacatctccgccagcgtcgctttagtgctgaccgccgcttcggtcagatcgacctgttcaatacccggatgttcagcaataacgcgcatcaccgcatattgaggtttggtgagctccggtagttcatgctgccagcgtgcggtatgttgctgaaaaagttggcgtaacagatgaaacgcggtgtttcgtaactccatgagcgctccggataaattaactttttctatcataacgacttatgcacggttttttaatgacgaatgctttagctaaacgtgcgcaggcgtcgggagcgatcttgtcgcaaaggccgtgtgggcgtattttgatcaaaatgttcgtatacgaacgatatttgaggtaagaaatgagattgattgtggggatgaccggtgcgaccggcgcgccgcttggcgtcgagctactccaggcattgcgggcgatacctgatgttgaaacgcatctggtaatgtcaaagtgggcgaaaaccactattgaactggagacgccctacacgcccgctgaggtagccgccctggcagattattgtcatagcccggccgatcaggcggcgaccatttcctccggctcatttcgtaccgacggcatgattattatcccctgcagtatgaaaacactggcgggggttcgcgccggctatgccgaggggctggtgggacgcgctgccgatgtcgtgttgaaagagggtcgcaagctggtgcttgtgccgcgggaaatgccgctcagcacgattcatctggaaaacatgcttgcgctttctcgtatgggggtggcgatagtgccgcccatgcccgcgttctacaacctgccgcaaaccgttgacgatattatccagcacatcgtagcgcgcgttctcgaccagtttggtctggagcatacgcgcacgcgccgctggcaaggactgcgacagacagcaaatttttcacaggagaatggataatggcatttgatgatttgcgcagttttttacatgcgctggatcagcagggacaactgctgaaaatcagcgaggaagtgaatgcggagccggatctcgcagccgctgccaacgcaacgggacgcatcggcgatggcgcgcccgcgctgtggtttgacaatattcgtggttttaccgacgcccgcgtggcgatgaataccatcggttcctggcagaaccatgccatctcactgggtttgccgcctaacacgccggttaaaaaacagatcgatgaatttattcgccgctgggacaattttccggtagcgccggaacggcgggcgaatccgggctgggcggaaaataccgtcgacggcgacgcgatcaacctgtttgatatcctgccgctgtttcgtctgaacgacggcgacggcggattctatctggataaagcctgtgtggtatcacgcgatccgctcgatcccgataacttcggcaagcagaatgtcggcatctaccgcatggaagttaaaggcaagcgtaagctgggtctgcaaccagtgccgatgcatgatatcgcattgcacctgcacaaagctgaagagcgcggggaagatctgccgattgcgatcacgttgggtaacgatccgatcattaccctgatgggcgcaacgccgctgaaatacgatcagtcagagtatgaaatggcaggcgcgctgcgtgaaagcccctatcctatcgccaccgcgccgctgaccggttttgatgtgccgtggggatctgaagtcattcttgaaggggtcatcgaaagccgtaaacgtgaaattgaaggaccgttcggcgaatttaccggccactattccggcggtcgcaacatgaccgtggtgcgtatcgataaggtctcttaccgcagcaaacccatttttgaatcgctctatttgggtatgccgtggacggaaatcgactacctgatggggccggcgacctgcgtgccactgtatcaacagctgaaagccgaatttccggaagtgcaggcggtaaacgccatgtacacccacggcttgctggccatcatctcgaccaaaaaacgctacggcggctttgcccgtgcggtgggcctgcgagcgatgacgacgccgcacggtctgggatatgtgaagatggtgatcatggtcgatgaagatgtcgatccattcaatctgccacaggtgatgtgggcgttgtcgtcgaaagtgaatccggcaggcgatctggtacagctaccgaatatgtccgtcctggaactggatccgggctcaagcccggcggggattaccgacaagctgatcattgacgccaccacgccggttgcgccagataaccgtggtcactatagccagccggttgttgatttaccggaaactaaagcctgggctgaaaagctgaccgccatgctggccaaccgtaaataaggagtaaccgatgatttgcccacgctgtgccgatgcacatattgaactcatggcgacttcgccggtaaaaggagtctggacggtatatcagtgtcagcattgtctgtatacctggcgcgataccgaaccgttacgccgtaccagccgcgaacactatccacaagcgtttcgcatgacgcaaaaagatattgatgacgcgccaatggtgccgagtatcccgccgctgctggcagaagacaaacggtaaaaaaaaggccagtcgacagactggcctttttttgacaagggtacttactcgcggaacagcgcttcgatattcagcccctgcgtctgcagaatttcgcgcagacggcgcaggccttcaacctgaatctgacgaacacgttcacgcgtaagaccgatttcacggcctacatcttccagtgtcgcagcttcatatcccagcagaccgaaacggcgcgccagcacttcacgctgtttggcgttcagttcgaacaaccatttgacgatgctctgtttcatatcgtcatcttgcgtggtgtcttccggaccgttctctttttcatcggccaggatgtccagcaacgctttttcggaatcaccgcccagcggggtgtctaccgaggtaatgcgctcgttgagacgaagcatacggctgacgtcatcaaccggtttatccagttgctctgcaatttcttccgcactcggttcgtggtccagtttatgcgacaactcacgtgcggtgcgcaggtatacgttcagctctttaacaatgtgaatcggcaagcgaatcgtacgggtttggttcatgatcgcccgttcgattgtctggcgaatccaccaggttgcgtatgttgagaagcggaacccgcgttccgggtcaaacttctcgactgcacggataagccccaggttgccctcttcaatcaggtccagcaacgccagtccacgattgccataacggcgggcaatttttaccaccagacgcaggttactctcaatcatgcgacggcgagaagcgacatctccacgcagtgcgcgacgcgcaaaatagacttcttcttcggctgttaacagtggtgaatacccaagctgagtcgcgtccaacacacgctgtgtggccccttgcgataacagctcttcttcagccaggtcgttatcactgggttcctcttcactcaaggctttttcgtcaaaagcctctactccgttctcatcaaattccgcgtcttcatttaaatcatgaactttcagcgtattctgactcataaggtggctcctacccgtgatcccttgacggaactagcaagtcaaagcctggttccgccgctttatcgctgcggtaaataacgcagcgggtttacggatttccccttgtaacgaatttcaaaatgcaagcgtgtagagctggtgccggtgctacccatagtagcgattttttgccccgccttaacttcctgttgttcccggaccagcatcgtatcattatgggcgtaggcactcaggtaatcatcgttatgtttgatgataataagattaccgtaaccacgcagtgcgttaccggcatatacgacgcgcccatcagcggttgcgacgatagcctgtcccttactgcctgcaatgtcgatccctttattgcccccttcggaagcgccaaagttttcgatcactttgccatccgtcggccagcgccatgcggaaatcggcgcgctggttgacgtactgcttgcatttggttcggtcgtgcttaccgttggtgccgttacaggcgctgtgacaaccgtcccagcaggcttgttgtttggcaacattttgttagcactttgttcacctgagccctcagaatacgtaattgttggttgagacgcaactgcaacggtggaattttgtgcagacctggtcacaactccttgctgtgctgcatccgcctgggtgatcgcatttccgccagtaattggcgtaccggatgcgttaccaacttgcaaagtttgccctacattcaggctatacggggcagaaatactgtttctctgggccagatcgcggaaatcgttcccggtaatccaggcgatgtaaaaaagcgtatcaccctttttcacggtgtaagtactgccacccgtatagctacctttcggaatattcccatactggcgattgtatacgattcgcccattttccatctgcacgggttgttccgtgaccggttgagtttgcatgggctgcgttacaggacgctgaacgggttgaatttgcggcgcttgttgcggcgtttgttgcgtcgtcgcgcccatttttggcggcggtgtgatcaacatcccggaattggtatttgatgacgaaccactgtccacagacgtgaccggcgccggagggtttgacgaactggtacaacctgccagccatagtgaaaccagtgatagtgccgcaatgcgactaacggtgaattttgggcttcccgcgctcatttatcccccaggaaaaaatttggttaacaaccagtgacgtaagaaccgtgcaacgcattaagtgaacacgggaaaatgtgttcacgatacgcttaacccaccgggaataaccaggaaaactccaggtattcgtttcggcttcatcaggcgtaagagtgggtgtttgcagggcaaactaggccagctctcccttgactaacgggacgaagcgaacggcctccacggtatcgataataaattcgccgccccggcgacgcacgcgtttcaaaaactgctgctcatcgcccacgggcagaacaagaatgccgccttcatccaactgtgccatgagcgcggtaggaatttccggcggcgcggccgtcacaatgatagcgtcaaatggcgcacgcgcctgccagccttgccagccatcgccatgacgggtagaaacattatgtaaatcgagctgcttcaggcggcgacgcgcctgccattgcagccccttaatccgctcaacggagcaaacgtgatgtaccagatgcgccagaatcgccgtctgatagccggaaccggtaccaatttccagcaccctggattgcggcgtcagttcgagcagctccgtcattcgcgccaccatatagggctgcgaaatcgtctgaccctggcctatcggcaaagcgatattttcccaggccttatgttcaaacgcttcatcaataaatttctcgcgcggcactgcagcaagcgcattaagcacctgctcatctctgatgccctgcgcgcgcaattgttcaagaagagcctgtacacgtccacttaccattgcgtgccaactcccacgctgtctaaccagtctgaaaccacatcatgcgcgctgtgcgcggttaaatccacatgcaacggcgtgacggagacgtagccttcatccaccgccgcgaaatcggtatccggcccggcatcgtatttatcgcccggcgggccaatccagtacaatgtattaccgcgcggatcttcctgcgggattactttatccgctggatggcggctaccacagcgagtcacgcgaatgcctttaacctgcgctaacggtagatccgggacattcacgttgagaatacgcccggtacgcaacggctcccggcttaaccctcgcaaaagcgcgcaagtcacggccgcagccgtatcataatgctgatagccgttaagggagaccgctaatgccggaaagccgagatgacgaccttccatcgccgcggcgacagtaccggaatagatcacatcatcgcccagattcggacccgcgttaataccggaaacgacaatatccggacgcggacgcattaaggcattaacgcccagatagacgcaatcggtcggcgtccccatctgtacagcgatatcgccattatcaaaggtaaaagtacgaagcgaagattccagcgtgagggaattagacgcgccgctgcggttacgatccggggctacgacctgtacatcagcaaactcacgcagcgctttcgccagcgtttgtataccgggcgcgtgaaccccgtcatcgttactcagcaatatgcgcataatcacccattgtgttgatcagttcccttactacgctggtggcaaaactgcctgcgggcagccagaaacgtaactcgacggtaacgtcatcccaccagttccagcttaattgttgcggataaagcagcatcgctctgcgcgacgcctctactttttcgcgcagcaacagcgattgcaacaccgtttcctgggcaatggcatcttgctcaaacgccagcgccgcacgctgtgttccccactctccgctgcccggcaacgacgctgtaatcatcagctctttttcgtctacccggcgctgcaattcaggcagttcttcagatgtcgcgacgaaccagcttccacgccccgctaattgtagcgcatcgccgtcaacaacttgattaaagtctggtttcttcagccgctggtgaacaatttgattaaacaacgcgctacgcgccgccgacaaccaaaaactgcgtttattgcgatcgcgcaccggcgcgttactttgcgcccagcgcagcgcgccctgcaagttgctgccgccaatgccgaatcgttgtgcaccaaaatagttcggcacgccgccatcgcgaatcgcctgcaatcgtgtttcgacatcgcggcgatcgcttatttcacgcaacaccagagtaaaggcattgcctttcagcgcgcctaaacgcagcttacgcttgtgacgcgcgtattccagcactttacaaccttccaactgaaaggcgctgaaatcgggcatctctttccccggcacgcgcgcgcacagccactgctcggtaacggcgtgtttatctttttgcccggcaaagctcacttcgcgagcgtgaattttcaggaatttcgccagcgcgtcagcgacaaaacgggtattgcaaccgtttttcaaaatacgcagcaaaatgtgctcgccttcaccatccggcgtaaagcctaaatcttcaaccaccacaaaatcttccggattcgctttcagcaatccgctaccttgtggttttccgtgcagccaggtgagattgtcaaactctgtcatttcgccgccttcatcagcaacgcgaccgcttcgcaggcaatgccttctccgcgtccggtaaatccgagcttttccgtcgtcgtcgccttcacgttaacctcatccatatggcagccgagatcttcggcgataaagacgcgcatttgcggaatatgcggcagcattttcggcgcctgcgcaataatggtgacatccacgttgccgagggtgtaccccttcgcctgaatacgacgccaggcttcacgcagtagttcgcggctatccgctcccttaaatgccggatcggtatccgggaagagcttgccgatatcgccaagcgccgccgcgcccagcagcgcatcggtcagcgcatgtaacgccacatcgccatcggaatgcgccaatagccctttttcataagggatacgcacgccgccaataataatcggcccttctccgccaaacgcgtgtacgtcaaaaccgtgtccaattcgcattatgctttctcctggtggatggttcgggtcagataaaattccgccagcgccagatcttccggacgggtgaccttgatattatccgcgcgaccttctaccagcgccggatgaaaaccacaatattccagcgctgacgcttcgtcggtgatggtcgcgccttcattcagcgcacgcgtcagacaatcgtacaagagttcgcgggggaaaaactgcggggtgagcgcgtgccataaatcggcgcgctctacggtatgggcaatagcgttcttccccggttcgccgcgtttcatggtgtcgcgcaccggactggcgaggataccgccgacccggctgttttcgctgatagccagcaaccgcgcaaggtcatcctgatgcaaacagggtcttgccgcgtcgtgcaccagcacccactgcgcctttgcaacggcctgtaacccggccaaaacggaatcagcgcgttcgttgccgccatccacaacggtgatttgcggatgattcgccagcggaagttgggcaaagcgatgatcgccagggctgatagcaataacaacgcgtgtcacccgaggatgcgccagcagcgcatgaactgagtgctccagaatggttttattaccgattgagagatactgcttaggacattctgtttgcattcggcggccaaatccggccgccggcaccacggcgcaaacgtccaataaagtggctgccatgttaaatccctggatggtttatcgatgagtttgccccgccgttgccgcgcgttttgaggcgtcaggcaccagacgatagaaggtttcgcccggtttggtcatgctaagttcgttgcgcgcgcgctcctctatcgcttcctggccgccattgagatcgtcaatttcggcaaaaagctgatcgttacgcgctttaagtttggcgtttgtcgcctgctgcgcgaccacatcatcgttgacgcggctatagtcatgtatgccgttcttaccgaaccacagcgagtactgtagccagaccagtaaagccagcaacagcagcgttagtttacccatcctgccccctgaaaaacggcatcatcatcccataacgtcctctgtgactccacattcaggacgggattgccgcgacaacgccggcaaatgtaccacatttgccggatgttacgtatacccgagtaaggagaacataatctcattgttggttacggtttgaattatgaccggaggcgcagtgataacccgtctaccctaatagccatataaataacgcgccgaacagcgcgcctacggccagtagagtaaacatgatgctaaaaagtattttgccctttaccagcagatgcaacgcaatgccgataatcaccgataccggcattaacgcgaggaaaaagggccaggtatagaggaaaaaaaacagcgtgttagggccataaagcagaaaagggatccccaacgccagcagccatgacacaaagccgaccaccgcccccggaaatgcactggtggcgtcatcgtcgaccatgaaggcgtctgaccttgtgaaagtaatgttatggctattacgcatattaaatcctgtaaccttgaccataccgggcatacaagcccggtggtgtctcaggatctgataatatcgcgccgtctcagcaggtctaataattgggaaaccaaatttgttactaattgttcaccattaagatgaacctgtggcgagtcaggcgcttcgtaaatggcgtcgatgccggtaaagttacgcaactcgcccgcacgcgcttttttatacaaccctttaggatcgcgctgttcacagatagccagcggcgtattgacataaatctcgataaaacgatcgtggccgacgcgctcttttaccagttgccgctcggcgcggtgcggagaaataaatgccgtcaaaacaatcaggccggcgtccgccatcaggctggccacttcgcctacccgccggatattctcctggcgatcggcatcgctaaagcctaaatcacggcacaaaccgtggcgcacattatcaccatccaacaggtaggtactgacgccacgctgatgtaacgcctcttccagcgcgccggccaccgttgattttcccgaaccggagagtccggtaaaccacagcaccacgccacggtggccgtggagctgttcacgggcggcgacagtaacgggatgagagtgccagaccacgttctcatcatgcagcgccatgtttatctcccagcaaatctcgggcgtcccagtgcggaaaatgacggcgtaccagcgcattcagctccagctcaaacgcactgtattccacgggcggcgtcgctccgcgttcatccagttcccgcaccatgccagcgcccacggtaacgttagaaagtcggtcgataaaaatcagcccgcccgtcaccggattttgctgataaatatccagcgcgagcggctcatcgaatgtcatctccaccagaccaataccgtttaacggcagactttcgacgtctcgttgggtcagattgttgatatcaatctgatagcgaatagcctcgatacgcgcgcgggttttcttacccgcaagtttaacgtcgtagctttggcccggcgccagcggctgttccgccatccataccacgtcgatcgcagcgtgccgcgcaggtgccagcgtctcgtttgccgccagcagcagatcgccgcggctaatatcaatgtcgtcgttgagtaccagggtaatggcttcgcccgcacaggcttcttctttgtcgccatcaaaagtaacgatacgcgccacgctggattccacgccggacggcagcactttaatgcgctctccgactttgacgctaccagacgccagagtgccggcatacccccgaaaatcaagatttgggcgattaacgtattgtactggaaagcgcatcggttgacggtctaccgcacgctgtatgtctaccgtttccaggacttccaacagcgtcgggccgctgtaccagcgcatattggcgctctgcgcggcgacattatccccttccagcgccgaaagcgggacaaagcgaatgtccagatcgcccggcaactgttcagcaaaggtcaggtaatcttcacgaatacgggcgaaggtctcttcgcggtagtcaacgagatccattttgttgattgccaccaccaggtgtttgatccccaacagagtggagataaagctatggcgacgcgtctgatccagcacgcctttacgcgcgtcgatcagtaggatcgccagatcgcaggtggacgccccggtcgccatattacgagtatattgttcatggcccggcgtgtcggcgataataaattttcgtctttccgtggagaaatagcggtacgcgacgtcaatagtaatgccctgctcacgctcggcctgtagcccatctaccagcagcgccagatcgagtttttctccctgcgtgccatgacgtttactgtcattatgcagagaagagagctgatcttcataaatttgcagagtatcgtgcagcaaacgacctatcagcgtacttttaccgtcatcaacgctgccacaggttaaaaaacgcagcaggcttttgtgctgttgggcaatcatccaggcttcgacgccgccttcattggcgatttgttgtgcaagtatggtgttcatggcggctccttagaaatacccctgacgttttttaagctccatcgaccccgcctgatcgcggtcaatcatcctcccctggcgctcgctggtggtagaaaccagcatctcttcgataatttccggcagcgtttgcgcgtgggattccaccgccccggtgagcggccaacagccaagtgtacggaagcgcaccatcctttttttgatgacttcgccaggctggagatcgatacgatcgtcatccaccatcatcaacatgccgtcacgttccagaaccgggcgttcagcagccaaatacagcggcacgatgtcgatgttttccagccagatgtattgccagatatcctgctctgtccagttggagagcgggaagacgcgtatactttcgcctttattaatctgaccgttatagttacgccacaactctggccgctgatttttcgggtcccagcgatggaaacggtcacgaaaggagtaaatacgttctttcgcacgggatttttcctcatcgcgccgtgcgccgccgaacgcggcatcaaaaccgtacttattcagcgcctgctttaacccttcggttttcataatgtcggtgtgtttagcgctaccgtgaacgaacggattgatgcccatcgccacgccttccggatttttatgtaccagcaattcgcagccgtatgcgttggcggtacgatcgcgaaaggcgtacatctcacggaatttccaaccggtatcaacgtgcaatagcgggaacggcaacgtacccggataaaacgccttacgcgccagatgcagcatgacgctggagtctttaccaatggagtacagcatgaccggattagcgaattccgctgccacttcacggataatgtggatactttccgcctccagttgccgcaggtgggtgagtcgtttttgatccataaccgttcctttgcaataccgttttttgctaaacatttcgattacacgactatagggagcgcaggagagtgaatgaaatgacgaattggaatgagtagttcctcaaaggaataacgcggcccaaaaaccaatatcaaaaaatgcttaacgtaccggattgccagcatttaggagcaaatgaaattgtattaacacgatcgcggtttcatactagccacgtaaaattttgttctgtatttaaggactcattatgttttccgcaacgcgccgctttgccgtcattctggcgctcggcgtaggctttatccttcctgcacaagcagcatcaccagggcctggtgaaatagcgaatactcaggcacgacatatcgccaccttttttcccgggagaatgacgggctcccccgccgagatgttgtctgccgattatttacgccaacaatttacccagatgggataccaaagcgatattcgaacgtttaatagccgatttatttataccacgaaggataatcgcaaaaactggcataacgtgacgggcagtacggtcatcgccgcccatgaagggcgcgtgccgcaacagatcatcattatggcgcatctggatacgtacgctccgcagagcgacgctgatgtcgatgccaatctgggcggtttaacgttacagggaatggatgataatgccgcgggattaggcgttatgctggaactggcggcgcgtctgaaagatataccgacccattacgggattcgttttatcgccaccagcggggaagaagagggaaagctaggcgcggaaaatttactcaaacgaatgagtgacgctgagaagaaaaatacgctgctggtcattaatctcgataacctgattgttggcgacaagctctattttaatagcgggaaaaatacgccggaagcggtgcgtacactgacccgcgatcgggcattagcgattgcgcgccgttatggcatcgccgccaacaccaatccgggacgcaatccatcctaccccaaaggaacgggttgctgtaatgatgcggaggttttcgataaagcgggaatatctgtgctttctgttgaggcgacgaactggaatctgggtaaaaaagacggataccagcaacgcgtgaaaaatgcctccttcccgaacggtaatagctggcacgacgtacggcttgataatcaacagcatattgacaaggcgctgccagggcggattgagcgccgtagccgcgatgtagtgcggataatgctgccgttggtaaaagagctggcgaaggcggaaaaaacgtcctgatatgctggtgaaacgtgtttatccccgctggcgcggggaacatttttcagcccttgtcgactgcggaacgcccctcggtttatccccgctggcgcggggaacacgcgaaatagtggggaaaaacccctggttaacccggtttatccccgctggcgcgggaaacactaggccttgataccatcgctcgcacctcgtcacggtttatccccgctggcgcggggaacacgtttattactgcttagttaattaatgggttgccggtttatccccgctggcgcggggaacacaggcgaataatctctaatagtctcaattcgttcggtttatccccgctggcgcggggaacactaaatctggcgtcgagacattcgaaatagtgccggtttatccccgctggcgcggggaacactcttttgattttgctgcgatgttataaccagacggtttatccccgctggcgcggggaacactatccacatatacccgcaatcatattcaagaacggtttatccccgctggcgcggggaacacaatcactgcgggggtatttagcggaaacggctcggtttatccccgctggcgcggggaacacgatcgagtaacgtgcgctggaacgcgtcggcgcggggaacacaattaaagccgagggtggcaccgcgccttattcggtttatccccgctggcgcggggaacacgcacctcgaaacggttttaaaacactaccgtttcggtttatccccgctggcgcggggaacactggaccgatggggccaacatcgccgaacgtggcggtttatccccgctggcgcggggaacacgttacgttcggtaaatggaaagcggcgaatatcggtttatccccgctggcgcggggaacacccagaaagtgccggtagtgcctgatgaacgaccggtttatccccgctggcgcggggaacaccgcgcccacttccgtaaaatacagataatccacggtttatccccgctggcgcggggaacacggcagcgggcgaggcaaacacattcggggcgtcggtttatccccgctggcgcggggaacacggtaatttctcatctaacagcctgtacgcctcaggtttatccccgctggcgcggggaacacgaatctaatgcaacagatgaataaacacgtaacggtttatccccgctggcgcggggaacactctttatcgtcaatgcgaaattttccgcgacgcggtttatccccgctggcgcggggaacactcccattcaccaacaacaatatcgccctgcaacggtttatccccgctggcgcggggaacacacttccttcagtcttaacgataatccgcaacgcggtttatccccgctggcgcggggaacacgcaaaatagcgatgagctggctacgcccactggcggtttatccccgctggcgcggggaacaccagcacgaaaaattatttactgtcgttgctcacggtttatccccgctggcgcggggaacacactaaaactatatatttgttctaaaagcccttttttactacataacaaactaccaacggtaagataacaattccttattattaaagaacattcaacttattgattttcaacaggaagaaaagaaaccaaacgcagtccatccaaatctaccggaatacgtctgttttcaccccaggtctggaactcaaaaccagactcagtatttgttgcccaggccattactacgtttccgactccgccaagctgtgtgatctgttgccaaatcatttcccgaatacgcttcgaggtatcgccaacataaacacctgcacgaacctcgagtaaccagacggcaagacgtccccgcaggcgcggcggtacgttttccgtgaccacaaccaccatactcatcaaccatgcccccgatggccgctatcacccagtgattcaggttccggtattgctggcggcaacatatccggcgcaggctgaggtggttcaatttcaccggcagcgagcacctcttcgatcagtgggatcaattttccggtcagcttcgaactgcgaaaaatatcacggcaggccaggcgcacttctttatcaggttccgccgggtgacgagcagcgatctcaaatgctttgggcaccaccgattcaaatttgatgatatcggcaatgtcataaacaaaagaaagcggcttaccactatggataaaaccgatagctggcgcatatcccgccgccaggatagccgcttctgaaatcccgtacaggcacgatgtcgccgcgctaatacatcggttgacgacatcccccttctcccagtctttcggatcatagttacgaccatgccacttcacgccatactgcttcgccagcaatgcataggtcgcccgcacacgggatccttcaataccgcgcagttgctcaacggcacgacgggcgggcggcggttcgcgaaaacgcagttcatacattttgcgcaccaccttcagccgcaggtcatcatctaacgccagctttgcctgataaagcaacttatcggctcgtgcgccgccgggttgtccggaggaataaacccgcactcccgcctcgcccacccacaccaacagcgttcccaccgtcgatgccagacgcacagccgcatgggaaacccgcgttcccggttccagcatgatacaagcgaccgaaccaacgggaatatgcgtgcggattcccgttttatcgatcagcacgaatgccccatccagcacgtcaatctgaccgtactggaggaagatcattgaggttcgatcttttaacgggatcgggttgagcggcacgaacgtcacgcgtcgtctccaggtttgatcatcatcattccgcagccaaacgcccggcttttaccgaacccctgcgccagacgttgcaggaaaagcgcgggttcgttaatcaccagcacgccggtatagtccacgctgctaaactgaatcatctgccgatctttcccgcgacgtatctgctgctgccgataagcatcaacgctcgcctcgcgcagagtaaagccattttgctccccctggcgcgccaaccacgtcagcgccgcctgctgctgataagaccaaatatcctggctatcaccctgcgttttacgctggcgtttcgcctccatcagcaaatcgtgacgcttgccgtttttgcaaaccgtcggattggcgcgcaggttaaaccgcagcgtctgccccgcgctcagcgttggcgcaaatgggcgagtctgcacgtcaaaaatcgcgctggcggcaggctgttcctgtgagagaacaaaaaagcgaaacgcgccctgtaactcttcgcggcgataaagaaactgccgttccttgctgccgggaaagagatcccataaccactggtgcatcacgtactcgccgcgctccaccagatgcaagagctgtgccggcgaaagctcgctggtgtgcagcgttattcttgagagatacacgcgtcctccttgcggagccacggcccctgattcacgctacgttcaccgaacagccattgctggcggctcaacggcatgtcgcgacgacgtaaaattttgctcgccgttaagccatcgtgttcaccttcccaccagcattcgttctgtaatctggggagaggcagtttcagcgcattgaattgatcctgataccaacgatatgcttcacgcaggacacccgccgcactcccttccagcagttgcggcgcaagcggcaacgccagagggtgacttttgcgccccagatacagcgggaatacaggatgttgtagcgacgtctgaagctgcgccaacgtgtaaggcgcgtccggcgtcgcgctgacagcgatcatccaccaggcgtcggtgtagtagtcgcgtcgggaaatcagcgcgctcagtaattcaggatcctgcaactcttcacggcggctgaagtaacgtgccttacgtacctctttcggcatctgcaccgtgtgataatcccgcgcccagcgcgggttgccactggcgcacagcaaaaattggtaatgacgattgaaggcgtttagccgttcctcctcatcgcggcgaattcccagcgccgcagctaataaccccaacagcgccgagcgcgagggtagctcatggctgtggcgcacttcgcctggcgcatccacgccccaggaggccatcggcccgtgaagctgaaaaaccagatattggctcataagccgccccttacgcgcagatgaagtcaagcacgtcttccatgcttccctgctgattcatcacgtcgaaactggcggtatcagtccgctggccataaaccttattcatattcttatgcagcgatgtaatacgcttaaccgcaacgttcaattggtctgtaccgttgatcggttcataaaacgcggccgccagtgaacgtggttggtcggtgcctttttcggccagcgcccacgaggcataggcacggctggcaaagctgttctgtttgccggtcggcgacactttcagcgccgcttcagtaaaggcgcgcagcgttttgtttgccagttcttcattgtcgttcaggtttttcaccagcagatctttgtcgatgcagatataggtgtaaaacagcgcggagccaaagccggtttcgccgagatggcctgcgcctgcatcttctgccgatgcctggcgtaggtcatccacagcggtaaagaaatcgtcttcgatgatcgtttcgctgacgccgaaggcgtgggcgacctggcaggcggcttccacgttaaaatcagttttcttcgctaacatccggccaaacatggcaatatcgacggccatgcgatcgtgacgtaacagttctgcttcctcttctgttgccggacgtttttcttctgccagacggcgcgccagcgctttcacggcctcaaactcagcagggctgatatgcaccagttgctcggtttcagcattcgtcaactcatctttgggtttcttatcctcttttaccttgccaaagcagttggcgatgttcttgacgtactcaaccgcttttttggcgtcaatgccgctatcaacgaggatttgcgccgcctcacgagcaatgcgaccagtacgaataccaatatggccagctaatgcctgttcaaataactcagatgtacgccaggcgcgtttcaggctctgagaggagatacgcagacgtgttgctccgccaagcaccacggtttttggcgcaccggtatcatcacggttcaggttagcggcggggtaagcggtcagtaaatggagctgaataaacgttgtcataaagatatccctgttaatcttgttcgttatcggtatcgccatcgccggcctggtagtattccagcgcccagcggatacgaagaaattcggttggccgctgctggcggcgatggtggttcagcaagtcattctgctcctggcaccagcagaaaatatcgtctgcaagagaaaacaggttgaccgaaccatctaacagcttcaccgcacgccgtaactggcgcagcagttcatccggcgtttttaccgctaataggtgggagaagcgtaattttgacatcaccggagtgtcgccacctttcttctgtccaagctgcgcagcaaaactcttttgctcatcaataaatttgatatgtgcagccagtgccgctgtgattgccaatgcagtaacattccagggtgctttgtttttccataaagaatgtgtttgcattaacaatgaatgaagcccctcagccaaacaggcatcattcaccgttttactacgtcgtaagctggcacgtaatccacgtttttcttgtagttcctcatgccactgacgcaaagtggctttatcatctttcgtcacaacactcattcagcagcctcctgtttctttgctttggcggcttttgcactttgtttttccgccgatgtcgtaaaatatttcttgcgcgcggtcatgatgcgttccagatcgctgctctcgtaggggttggtaaagacgtgatcatcgaagtaatgacgggtaaacagccaaagttctctttgccatttattcagcctttcgtccggcttgtggccgttttccagatcgtgaatcaggttgagaaaacgtccctgcgtcaggttccagaaatcaatgtcgataaaactgaaatcaccgcgagcacccttcgcatcggcaaaccaggcctctttgagcgcgctgcgaagcaggctcaacaggcgggccgcagtttgcacggccttacgtaaatcagggatcagaccttccgtcatcagcaacgggaagtgatgctcataccagcagcggattttcatattgtcgaaatccgcgccaaagccccagatccccgctttaacgtcagtcagcgagcgggcgttaaacaccttgactacctgcgcgggagattcgtaattcgcttccgtctggttgttctgacttaatcccagccagtcgcgccagataaggccgccgggctgcggtttaacggaaaagaaggcgttttgatcttttaccggggcgcgataaggcgtcagcgggtgccgccagccatcgtagttaacgccgtagttcttgacggtcataaagccaagaagctcatcgctttcagcgccgcaaatatcgcagcaacctgactgtaaggtggcaaaatccaggcggatacgacgcggcatcccccagtacgcctggagtttattgacctgctccggcgtggtaacggcattcgcctgctcgctggtccgcgtcgcggcaagccacgggaaaacggtcgcatcacactggtctggtaaaggcagatccgcagtatcctgcggcatcacgttgagccacagcttgcgccagagcggcgtttgccgctcgccctgatattcctgcaattcaaccagcgtggtcagtggcccgccgccgcgcagcccggtacgatagcctttgccgcccgcaggcgcgttaagctgcaacgagaacagcgccagcgccgcgcagtgcggacaaaaacgttccgttacgccgcgtttgacaaaatgatctttattgaacttcgtggtttgcgcgccaggtatttccggcaacaatgaggcaatagagactttttcgccgcttaacggttcaaaatcctgcataaaagacggcgtttccgcgccaaactgaaaagcgtgttctaacggtgctaatgccttatggagcacatcggcatgcaatccatcaaaccagatatcctcccaatttttgtatcttttcggcgcgatactgcattgcagcaatcccaacagaaactgccaagccgctccctgtaaatctgctcgcgttgcggcgatgtccaccacgttttcatccgccagatcgacgggggccagcttgcccgtggaaccgtctttgaaacggacggggagccagggcgttgttaaaagtgaaaaattgtccatatctgtattcgttattcccccatcatgccaatcaatccctcattcgccgaataaccacaagcggcaaagtccgtcaccacaatcaccgtggcaaaatccttatcctgatgctgttgcgcacaccacttacgcaagggttcgccgtctaatttttcaaactcgtctttatgtttattccaccagctctgacgtactcgcagcacgctcatctcccaggcgtgttcaccgctggcataaggggttacgacgctatccacgattttcgccagccacagcgtgacagactcttccgccagccgcgttgacattttctccggtaaagaatcgctaatttcagcacagtagcccggcgcaaagttaagcagcatctggccggcaaatgcccggtcgcaataaaatttgccttcctgcaattgctcggtttttgcaaatccaaccggcatgttgacatcctcgccgtagaccgactcaatcaacaatcgggcagattgcggcatccgaatcgtcccctgctcacgtaatatgcgctgtgtcagccacatgcgcccatgatcgggatagacataggcgctgttacgcatggcgctggataaccagttctctcgcggcgcgtcatcccactccggagcaagaatgcgcagcactggcgtctctcgctcatcctgcccactctttttcaccagaccgttacgatcgcgaatatgacgctgtagtcgaccggcccgctgaattaataaatccaccggcgctaaatcagagatcatctcatcgcagtcaatatccagactttgttcgatgacctgcgtggcgataatgaccttaccggcacgttgcgcgccgctctgtttgccaaagagattcagcgtctgtgactcaatccgctgacgatcgtaaaaagcaaagcgactatggaagagtaaaaggttttccgtgacgacgaccttactcagttgaagctggcgatagatacgaatcgcatcatcaacggagttacgtatccaggcgatacagtttcctttttccactgcttcacctatacgttcaagacacgcctcttcactatgtagccagccaatatctacgcaacgctcaacctctttgcgtgtatcaacccgctgagaaatcagctctgtttgtgtgacctgagtcagccagggataatcgtcatggcctagcaacggcgcctgcacactacgcctcaccccacgggaaaatgccgccaccagcttatctcgctgctgctgcgatagcgtcgcagataacagaatagtggcgttgccattactggcctgccgttcgatcaaaccttcaagtattcgggacatccaggcatcacaggcatggatctcatcagccagtaagatcttgttgctaagacccagtaaccgcaggttgttatgtttaaatggcattaccgccatcatcgcctgatccaacgtgcctacgccaacctccgccaacaacgcttttttattgctgtcggcaaaccaggcggcgcatccctgactataaggctgcgcttcatcgggttcttccgtaccagaaagagtgaccgaccatattgactgattgaaacgatccattaagcgacgcgcgctatgcgccagaatcaggctgggacgggagtccggctgatacagcgccagccaggtgttcgccatacgttcaaacatcgcgttggctgtcgccattgtcggcagtccaaaatagagtccctgcgctttacctgccgccatcagtcgatgagctaatatgagcgccgcctctgtttttccggccccggtgacatcttcaagaataaagagttgggcgccatccacgttgatatccagctcaagcgccttttgttgtaacggtgtgggatgctgaataaaagggaaaagcgtttctatgcccgtaaaggcagacacattcgccgctgagggaaatagcgtgatggcagtttgtgctttagcgagagcttgctgccagtaggtatcaacaggcattttttccgcagtacgcggaaaataacggctggcagaaccagtccagtcagccagtacaaccgcagcggaaataaaccaggaaagttgctgaaattggtcgataccctcatcttcatcccaggcttcaggcaaagtaattaaaggaaagagcgcttttattctcagaagaaaatctcttgccgcgtctttatcctgctggcgaaaatggtccagctcctggattgcctctggagggcgtccatgatgacctgtagtgactggcatccaaagcgccataacgcgcttacttttacgaactgaaagcgaagaaggaggaaacaattcagggcattcacttagccaggagttccacaacatgtatcccagcgtggtatgcgcgattttttcataatgccgtgtaggctcattaaagatatttaaagcctcatgacggtatagttgctggaaggaatgagcaaactttccaatatcatgccaacataaaatccaggcaaaaaattgcgccgcctgctccttatcctggatgcctaatttttttagatagtggtcaataaaataaatattatttatcaccatccagtaacccacagccgcaacatctaaagaatgccagcaaagcaaatggtaatcatcaccgccgtcagtttctcctcgtcgagactttccccaatagtgatatatcgacacgtaaactccagcatgtggataataaaagcactctacgcctttttaatggtcttttttgttgatatacctcacaaaaattgcacttcctgagattatatttaaatatgcccgctcaattttatatattcttcagaaatatttaccccacgaataattattataaatttttccgcctttttcttctggaagaagcgctcaaagaggcttcctccaatgccttctgcataaaccaaaatttaaaaaaaacgaccatttgcggcgaatcatctaccttttgtctgaattatcgtcaccacaaaggattaccaaccataaatgtgctgtattaataatgtcgttcaaattctctcctgtagtaaactttatctgtttaataaaaaagagagaattgaacgatatattttactccggatattgaataatataaatttgaaggaaaatattatgccagtcactttaagcttcggtaatcatcaaaattatacgcttaatgaaagtcggcttgctcatctgttaagcgcagataaagaaaaagcaatccatatggggggttgggataaagtccaggatcattttagagcggaaaaaaaggaccatgcgctggaagtgttacactccatcattcacgggcagggccgtggtgaacctggagagatggaagttaacgtagaggatataaataaaatttacgcctttaaacggctacaacatctggcctgcccggctcatcaagatctgtttactatcaagatggacgcttctcagacacaatttttacttatggtcggcgacacggtgatcagccaaagcaatattaaggacatccttaatatatcagatgatgcagtgatagaatctatgagtagagaggagagacaattatttttacaaatatgtgaggtgattggttcgaagatgacctggcacccggaattacttcaggagtcgatttcaactctacgaaaagaagtgacgggaaatgcacaaatcaaaacggcggtttatgagatgatgcgtcccgcagaggctccagaccacccgcttgtcgaatggcaggactcacttactgcagatgaaaaatcaatgctggcctgtattaatgccggtaactttgagcctacgactcagttttgcaaaataggttatcaggaggtacaaggtgaagtcgcttttagcatgatgcatccgtgcatctcctatttactacatagctattcaccgttttcagagtttaaaccaacaaattctggttttttaaaaaaacttaatcaggattataacgactatcatgcaaaaaaaatgtttattgatgtaattcttgaaaaactatatctaacccatgaacgttctttgcacattggtaaagatgggtgcagtcgtaatatattactgacataaagatagtcagtaatataaccaatttaaaatccggctgcctgccggatttttcatagcagcaagtataatcataccgcgtaaggacaattacccttcatgcagcccgcactcgcgcttcagcccgaagaagcgtgtctcttcttccgccatacccggctcccatttgcgggtggtgtgcgtatcgcccaccgacagatagccctgatcccacagcggatggtatttcaggccatgcttttgcaggtactggtaaacggtgcgattatcccagtcgataatcggtagcactttaaacacgccgcgctggatagcgagaacgggtaaatgcgcgcggctgccggactgctcgcgacgcagacccgcaaaccacgtctgcgctttcagctcttttagcgcccggttcatcggctcgactttgttgatctcattgtatttctcaatgccctcaacgccctgctcccacagcttgccgtagcgcgcttcctgccaggccggactttcgcccgcgcggtaaactttcaggttgagtttgagtttgtccgttagctcatcaataaactggtaggtttccgggaacaaatagccggtatcggtgaggatcaccgggatatccgggcgaatctggttcaccaggtgcaggctcaccgccgcctggatgccaaagcttgaggagagcacgtattcgccgggcagattttccagcgcccaggccacgcgttcttcggcgctcagtttttccagttgggcgttggtttccgccagagccattacgcgatcgacttttggcaattcattcaatgcgttgagatcgagttgggacatgagttcctcactgtttgccttgcctgatggcgctgtgcttatcaggcctacacagacgccatccggcaattcaggttattcccagaaatcacgcgcgggatcgagcaccgggcgaatgatgcccgcacgcaccgtaaagtcgccgaagccttcacccgcttcacgctctttcgcccagcgcccaatcagttcatccagcgaggccagaatatccggctcggcgatattttctttatacatccgtgggatacgactcccgatgcggttgccaccaagatgcaggttataacgaccaggcgctttccctactaagccaatttccgccagcatcgcgcggccacagccgttcgggcagccggtcacgcgcatcacgatatgctcatcaggaatgccgtgtttttccagaatcgcttccactttgtccgtgaacgacggcaggaaacgctcggcttccgccattgccagcgggcaggttgggaacgacacgcaggccattgagttttcacgctgcggtttcaccgcattcatcaacccgtggtcgcgcgccagcgtctcgatcttcgctttctggctttccggcacgctggcaataatcaggttctggttagcggtgatacggaactcgccctgatgaatcttcgcgatctccagcaggccggttttcagcggacgccccggataatccaggatacggccgttctcaataaacagcgtcaggtgccatttatcatcaatgcctttcacccagccaatcctgtcgccacgcccggtaaactcatacgggcggatcggctcaaatttgatccccgcgcgacgctcgacttccgctttaaatgtctccagtcccacgcgctcaagggtgtatttggttttggcatttttcctgtcggtacggttaccccagtcgcgctgcgtcgtcactaccgcttcggccaccgccagggtgtgctccagcggcagatagccaaactcgctggccgtacgagcgtaggttttcttattaccatgctcaatagacagaccgccgcccaccagcaggttaaagccgaccagcttgccgttctcggcaatcgccacaaagttcatgtcgttggcgtgcagatcgatatcattttgcggcgggatcaccaccgtggttttaaatttacgcggcagataggtctgcccgaggatcggttcttcatcggtggtcgcgaccttctcctgatcgagccagatctccgcatacgcacgggtgcgcggcagcagatgttcggagatcttcttcgcccattcgtaggcttcagcatgcagctgagactcgtacgggttagaggtacacagcacgttacggttcatgtcgttggcggttgccagcgcatccagccccaccgagtgcagcatctggtgcaccggcttaacgttcttcttcagaatgccgtggaactggaaggtctggcggttggtcagacggatactgccgtaaatcgtgttatccgccgcgaatttatcgatcgcctgccattgcgtcgtagtaatcaccccgcccggcaggcggcagcgcagcagcatcgcgtggcgcggctccagcttctgcgccgcacgctcggcgcgaatatcgcggtcatcctgctgatacatgccatgaaagcgtatcagcaggaagttatcgcctttaaaaccgccggtgagaccgtcgttcagatcttccgcaatggtgccgcgcagatagttgctttccagcttcatgcgctcggcatcggacagtttaccttcgaccaccagtgggcctggatgtttttcgctcattagtagacatctcgctgataacggcgctctacgcgcagctcacttaaatattcatctgccgattcgaggtccataccgccgaattcagcgatcacttccagcaatgctttttcgacatctgcggccatgcgcctggcgtcgccgcagacataaatatgcgcgccatcattgatccagcgccacagctcggcgccctgttcacgcagcttgtcttgtacgtaaattttttctttttgatcgcgtgaccaggcgagatcgatacggcttaacaccccctctttcacgtagcgctgccactccacctgatagaggaaatcttcggtaaagtgcgggttgccgaagaacaaccagttcttaccttccaccccttccgccgcgcgctgttgcataaaggagcggaacggcgcgatgccggtaccggggccaatcatgatcaccggcgtttccgggttagctggcaggcggaagttatcgttatgctcaataaagacgcgaacttcgccctcttcttccacgcggtcggcgaggaagctggaagcgccaccggcgcgggcgcggccttcaatgtcataacgaaccacgccaacggtgatatgcacttcgctctccacttcagcctgtgcggaggcgatggagtacagacgcggcgttagcggacgcagcaggtcgattagcgcctgagcatccagctgtgccggagagaaacgcaccatatcaacaatgggcgtggtcgcggcgtaatgctggagctgcgctttgtcgcccactaatggcaacagcgactcactgcgcgtcagggtcgcgtagttctcaacaatgttggcggtattcaccgtcagctcgaagtgccactccagcgcttcggcgagcggcagggttttaccgtcaaccgtcaccggctcatcgcccttcagccacagcaactcaaccagctccttcaccagagccggatcgttctgataccagacgcccagcgcatcgcccggctgatagcgcaggccggagtcgcctaaatcaatctcaatatgacgcacatctttttccgagttgcgaccggtgattttctgattcacggagagggtcgcgatcagcggcgcgtctttagtataggggctggtgtggatgtcgtttaccgcgccagtagcgacggattgcgaaggtgccgcgacaggtgcgcgagacttcagaacatcaaccacgcgggcgcgccattcgctggcagctgcctgatattcaacgtcagcatcgacacggtcgagcagacgttcaccgcccagttccgccagtttgctgtcgaaatcttttccggactggcagaaaaattcataagaggtgtcgccgaggctaaacacggcaaaagcggtgttttccagtttcggcgcttttttggagaacaggaatttatgcagcgcgacggcctcttccggcggctcgccttctccctgggtggacgtcactatcaccaacagtttttcactggcaatctgtttgaatttgtagtcgccggcgttcaccagtgtcacattaaggttggccgccagcagatcatcacgcagcgcttccgccacacgacgcgcattgccggtttgcgaagcggagataagcgtaacccgcggcatcttccgctcaggaacaggcgtgacggcaacagcgcctgagcgcgggttcagtacgccccaaaaatagccggagacccaggcaagctgttcgggagtaaggtcggttgtcgcggcctgaaggcgcgccagttgctccggattaagcggaagcaacccagtcagtggagccggtgtcgtcatgcgtcgttatgttccagtaagcaaagcggatctatacacaaaatcattcaagttcgccgtaagctgatcgcgccccaggagcgtacataaatacgtgactggggtgagtaaacgcagtcaacacagatgcggcttgaaagatgaaatgtataagcgataaatcccaaactgaggataaggttaacggtgagaggaataacaattaaagaagggttggaaataacaaataaccaaatgaactaacctgttttagttatcgttattaacgccaaaatcgattttataattgattgataattattaaattttctggaaattcttaaattaattgcccgtcacaaggcggagaatggttttagttaatgataaaaaatgcgctttccggtaccctacggcggtttttttattgcctgagagttcatcatgtccaccacgttgtataaagatttcacctttgaagccgctcaccgcctgcctcacgtgcctgaagggcataagtgcggccgcctgcacggacactcgtttatggtgcgtctcgaaattaccggtgaagtcgatccgcataccggttggattatggatttcgcggatctcaaagcggcgtttaaaccgacttacgatcgtcttgatcactactatctgaatgatattccagggctgtccaatcccaccagcgaagtgctggcaaaatggatttgggatcaggttaagcccgtcgtgccgctactgagcgccgtgatggtgaaagagacctgtacagccggctgcgtctatcgcggcgaataaggtttattaacgcgtgggctggatgtcaaattgattccagcctatccacacgacgtttcatcagtgaaaacagtccagcgcgtggtgttaaaagcgcagtacatcaccggttgcaggtgcggttatttccggtagccacaaccgcccccaggcccctgtacagtgacaaccgcatagtttttcaggtttatgttcttgcagaaagcgcctgactcgccacagcgtgaacggtgatgcgcagcggagatgaaatccgccgacaagcgcgtaaatccgctttataccagtaatattctgacagtgccggacaatatttgcgatcccccgatgcccgcatcccgtaatgatgactaatccttttgtcgattggtaaatcagtacgccctcatccaaaatagagtccggctccgcatcgtggccgccaaaaatgccgtaggcttcaggcgcgaccaccggtatttcccctgaccagataaagttttcgccaatcggcagggggtcacgcgtgtacatcattcgatagcgtgaatagtccacctcacacgacaatttttttatttttcgggtaataccaagaaaagtcattgctgcataacgttcacgtgcaatatcgggatggcagatgattcgactgctatcaggaagccacggcacgccgccgcaatgatcgtaatgaccatgcgaaagcaccacagcagacacatcggacaggtcgatccccatcgccaacgcgttttgcataaaactgccatcagggccggtatcgaacaagatagacgtagactcatcctcgaccaacaggcttaaccctggccggaccttcaacgatttatccgctccagctcccttatgattttcgagcaataccctgatccttaacgccatggccttctcctgtctaaaagcctccccgggaaaacgcggcctttttactttacaggtttgtagctgccattactggtacacagattatgattatgcaacggctatccttgttggcgcggggaacacatcttcatattgcgtgacgctgccgatgaacgcggtttatccccgctggcgcggggaacactctttatcagctaaccatttccagaactcgtccggtttatccctgctggcgcggggaacactataatatgaattaatttttgcgcataacctgcggtttatccccgctggcgcggggaacactgcccgttctgcctcttcgcactctcgatcaacggtttatccccgctggcgcggggaacactgcgtaatgggctacctgaacttcacatatcccggtttatccccgctagcgcggggaacatattaagcgcgcaaagtttgggttaattggacacggtttatccccgctggcgcggggaacaccgtattcgtcacacagccccgtccagaaatgacggtttatccccgctggcacggggaacactaacgaactgaataaaatgtcagaaagtgacgcggcttatccccgctggcgcggggaacacgcagcttagcgacgaaattaaaaccgaactcaccggtttatccccgctggcgcggggaacactgccagtgactacagaagcgtctctatcggggcggtttatccccgctggcgcggggaacacaccgataaacaaccgcatagcctctttcgtttcgatttatccctgctggcgcggggaacactgctcaataacgtcgtaaatagcgtaagctggcggtttatccccgctggcgcggggaacactatttcgccttcggcactgacgtcaccgtcaacggtttatccccgctggcgcggggaacacgtcgcgttcgttgccggtatagaccagcgtcacggtttatccccgctggcgcggggaacacatcgaatcgaaaccccagccacagaaataattcggtttatccccgctggcgcggggaacacatcgaatcgaaaccccagccacagaaataattcggtttatccccgctggcgcggggaacacgctcatgtcaaacgccatcagcgttccggcatcggtttatccccgctagcgcggggaacacaatcgccagcctcggaaatattccatcctccgcggtttatccccgctggcgcggggaacacaggaactaaacagcctgaccgttgaggatctgcggtttatccccgctggcgcggggaacacaccggacaaatcttttttttcctgttcctgttcggtttatccccgctggcgcggggaacacgggcactatgaacggatcggcgctgatgccggcggtttatccccgctggcgcggggaacacggtaaagccacaccattttttattgacctcgccggtttatccccgctggcgcggggaacacctaggaggcgtaatgaatactacgtatcaaaacggtttatccccgctggcgcggggaacacgtggtggcctcaaataaattcgagcgctggagcggtttatccccgctggcgcggggaacacgaaacgtaaacagggtaagatacaactctgcacggtttatccccgctggcgcggggaacactgtaaagggtggtctggaaggggatcggcaaacggtttatccccgctggcgcggggaacacactaaacggatataattgtttataaactactttttgtcagcaccacattctaccaacataatcgcaacaatttaaattattaaagaacagctaatttgctgattttgatgcaaaaaagttcatagaatgattttttctttaaatttaccaaaatagcgtgatccgtgcatcgctatggaaaaatttatcagcgcttttatacactcatcgaaattcacatagagaaaataaacaatgcaaggtaatggatgagtcacagacggcatcggcaggccgtctgtaagattagtaatgcatcaggcgatatttaaatatttatgcgtttgcatagacagccgccagttacgtgcaatacacgtttcaatacacagacgcgtcgcgtcttctttctggctaatgggctgcaaagcaatcacacgcggtttatcatcgctcaacgtggctaacagttcatccagcgcctcaatatcacgaactcgcccaacgggatgcttgatttcattggcgcgctccagcgcctgggaaagcacgtcatatcccccgcgcatattcacttttggtgaaaccgtgacccaggtgttaggcgtacagcgcacttcgtgcgtcccgctggtttcaatctgacaactaaaaccactcttttcaagcagatcggtgagcggcatgaggtcgtgaatacagggttcgccaccggtgatgacaacgtgacgcgcggtatagccctgacgattaattactgccagcaagtcttcactgctcgcagcaccccatttgtcgctctctttggtttttgccagaatgctgaacagagacacttcccgatcgctcagtttatcccaggtatgcttagtatcacaccaggcacagccgaccggacatccctgtaaacgaataaaaatagcggggacgccggtaaaataaccctcgccttgtagggtctggaacatctcgttaatcgggtactgcatagcgttctctattaaggggataatcgttaattattgcagatttcgtctgcccggtcatgcacagcggctgcgctattgaacagatacaaaaaaacccgccgaagcgggtttatacgttaagaggtaaaagcaggattacgcctggcctttgatctctttacgaccgttatacggtgctttttcgcccagagcttcttcgatacgaatcagctggttgtatttagcaacacggtcagaacggctcatagaaccggttttgatctggcctgcagcggtaccaacagccaggtcagcgatggtagcgtcttcagtttcgccagaacggtgagagatgacagcagtatagccagcgtctttcgccatcttgattgcagccagagtttcggtcagagaaccgatctggttgaatttgatcaggatggagttagcgatgcctttctcgatgccttctttcaggattttggtgttggttacgaacaggtcgtcaccaaccagctggattttgtcgcccagtactttggtctggtatgcaaaaccgtcccagtcagactcgtccagaccatcttcgatggaaacgatcgggtactgtttggtcagttcttccaggaagtgggtgaattcttcggaggtgaacgctttgttgccttcgccagccagaacgtatttaccgtctttgtagaattcagatgctgcgcagtccatcgccagggtgatgtctttacccagctcgtaaccagccgctttaaccgcttcagcgataacagccagcgcttcagcgttggaacccaggttcggcgcatagccgccttcgtcacccacagcggtgttcatgcctttgcctttcagcacttttgccaggtgatggaaaacttcagaacccatacggatggcttctttaaccgttttcgcgccaaccggctggatcatgaattcctggatgtcgacgttgttgtcagcgtgctcgccgccgttgatgatgttcatcatcggaaccggcatggagtatttgcccggcgtgccattcagttcagcaatgtgctcgtacagcggcatacctttagcggcagcagcagctttggcgttagccagagagacagccagaatggcgtttgcaccgaagttagatttgttttcagtaccgtccaggtcgatcatgattttgtcgatgccagcctggtctttagcgtctttgccaagaatagcctgagcgatcgggccgttaaccgcgccaacagctttggttacgcctttacccaggaaacgggatttgtcgccatcgcgcagttccagcgcttcgcgggaaccagtagaagcacctgacggagccgccgccatacctacgaaaccaccttccaggtgtacttcagcttcaacagtcgggttaccacgggagtcgatgatttcacgaccgatgactttaacgattttggacattaggttttcctcaagtcactagttaaactaaaacttcagacaaacggtgcaccgctgagggtgcaccgccgttctaacttttttacttcgcctgacgtttctgatgctcgttggcggctttaacaaagccagcgaacaacggatgtccatcacgcggcgtggaagtaaattccggatggaactgacaggccacgaaccacggatgattcggtacctcaatgatctcgactaactgatcatcaccggaacggcctgcgacacgcagacccgctgcttcaatttgtttcaacaacatattgttgacttcgtaacgatggcgatgacgttcaacaatcgtcgacgcgccgtacaactgacgtaccagactgtcatcgctaagctggcactgctgcgcgcccaggcgcatggtgccgcccagatcgcttttctcgctacggacttcaacgttaccgtcttcatcgcgccactcggtaattaacgccacaaccgggtacttacagtctggcacaaattccgttgagttggcgttgtccatgccggccacgttacgagcgaactcaatcaacgcaacctgcatccccaagcaaatgcccagataaggaatattgttttcacgcgcatagcgcgcagtggcgattttaccttcaacgccacgatagccgaagccgccggggatcaggatagcgtccaaatctttcagaatttcgacgccgcgcgtttcaacatcttgcgaatcgatcaatttgatgttgacggtaacgcggtttttcagaccaccgtgtttcagcgcttcgatcaccgacttataggcatccggcagttcaatatatttgccgaccatgccgatagtcacttcgcctgccgggttcgcttcttcgtaaatgacctgttcccattcagacaggttagcttccggacagttcaagctgaatcgtttacaaatataatcatcaagcccctgagatttcaacaggcccggaattttataaatggaatcgacatctttcattgaaataacggctttttccggcacattacagaacaatgcaatttttgcacgctcgttggcaggaaccgcgcgatcggaacgacaaatcagaatatcgggctgaataccgatagacagcagctctttcacggagtgctgagtcggtttagttttcacttcgcccgcagccgccaggtaaggtaccagcgtcaggtgcataaacagcgcgtgttcacgaccgatatctaccgccaattgacgaatcgcctcaagaaacggcagcgattcgatatcaccgacggtaccgccgatttccaccagtaccacatcgtggccttcgccaccttccagcacgcgctctttaatcgcgttagtgatgtgagggatgacctgtacggttgcgcccagatagtcgccacggcgttctttacgcagaacgtcggagtagatgcggccagtcgtgaagttgttgcggcgagacatcttggtgcggatgaaacgctcgtagtgccccaggtccaggtcggtttcagcgccgtcttcagtaacgaacacttccccgtgttggattgggctcatagtacccggatcgacgttgatgtacggatccagtttcatgatggtcacgttgagaccacgggcttccagaatggctgcgagggaggctgcggcaatgcctttacccagagaggatacgaccccgccggtcacaaaaatatagttcgttgtcatgcggaacctgagaagttaggtttaaaagacgatggaataaccaggacgggaaagcagtatacccgaacatgacctacgccacaaactttcattattcctcctcttcgtcaggctgacattcacacagggagggagaaaatagcccctttgaggtaaatgtttttgacgtaaatcaagcgcttgttatttaaaaaatcacacaaatcgctcttgaccgcctaaaacctttagagatcaatttcctggcgttttacttcctgccaaacttcttccattgtttccaggtccaccccggtcatttccaggcctctggctgcgacaatacgttcaacttcgcgaaaacgacgttcaaatttatcgttcgctttttgcaaagcgagctccgctttcgtacctaaatgacgcgccatgttgaccgtggcaaagagcaaatcgcccatttcctcttccagtttagcctgatcaacaaccgcctgccgcgcctcgaacatcacctcatcgatctcttcatagaccttatcgacgaccggtcccagcgtcgtccagtcaaagcccacgtttgaacaccgtttctggattttttgcgcgcgcattaaggccgggaagctgcgcggaatatcgtccagcgcggaatgctgcgctttttgcgcgcgctcttccgttttgatttgctcccagcgaactaatgcttcttcgctattatccgcggaaagctcgccaaaaacatgcggatggcggcgctccagcttgtcgctgatggcagcgcagatatcattaaaatcgaagcggccttcttcctgcgccatctgcgcgtaaaacaccacctggaacaacaggtcgcccagttcgccgcgcaaatcgtcaaaatcctcacgcgcaatcgcatccagtacttcataggtttcttccagcgtataaggcgcgatgctggcgaaggtctgctctttatcccacgggcagccgttttccgggtcgcgcaggcgctgcatgagggtgagaagacggtcaatttgatggttagttgtcatggtttttaatcggttgtaaataccagcgacaattgtaacgtattattcttaaccattcacgcacagagacactacgacaacgcctatataataaaatatattgttaacaggtgttgaatgctacctttcccgtataactttaaaattattaatcgatacacaacaatataataatcatataactaatttattaaaaaaacagatatttgcaccagacgttataaataacatcaattaagtaaaaaaatcatgcaaacactataagcaccccacccaaagagccttccctttcaaaaaaaaataaattatttcacttttacggaaaaacgagtagcatgcacgccagtttaatattcaaaaaagaccgcttttttgttttttctggaacatacatgaaataaatatattgaaagtattacatataatattctatgagcaggtacgatcattcagctcataagaatatactcatagaaatgtagaaatataatatttttattatgacctatttttacccaaagcccgcagcatggctctatgccgcatatcccttggtatacgcgtacaaaatgttgccataaaacacgttaattaaggataacacgatgaagtcatctcatttttgtaaactggcagtaactgcatctttagttatgggaattgtctccggcgctcaagccgcgggtagcaacacagcaaaggtcactttccttggtaatattgttgattccccctgctctctcacacttgttttttagataaaaaggctataaccaatttacatgcttaccagcatcctgattctggctcagaatacgtatcacgataacttccgtaactgattgtataaaatagataatatgccttttaaacggtaaggcataaatgtattcacccagttcaggtcgaggcgtgccaatgttattggcactcataatgctgaatatttctgatagatgattaatatatcgatcggcctgtatttcgccaaaatgctgccagccgtaatgccagatattttccagatcttcactggcctttggcgttaattttaccattctcatcgggtttgatcatccctgttttgaccttccgtaaaaaggcatccttttcccaggcctgcggctctccgctgttcagaccttcagccagaagttcacgtaacgcctgaagtcgtgactcggcctgtttttccctcagcagacgaagagactctctgatcacttcactttgtgttctgtaatcacctgattctatgagcgattcaataaactcgcgcagttcatcgccaagatcaacggtcattgttctggccataacagcctccactgtaagtataaatcttacataagagtacaccggaaatgaaatgtacgtcaaaaacataccccatatctcatgcttatggggttgctaatgcggctttgctgaacgagtagcaaagccgctacatgattactgtctggggtttaccccccgtgcagtcgccgtgcatcaatcacatccggcacctggttcagcttaccgagcacccggcccagcacctgcaggttgtagatctcgatggtcatatcaatggtggcgatctgctgtttaatgtcgctgcggctggcgacgcccagcacgttgactttttcgttagccagaatggtggtgatatcgcgtagcaagccgctgcgatcgttggcctggacgcgcaccaccagcgaatatcccgccgagtagctctcgccccataccgcctctacgatccgctccggcgcatgggagcgcagttccgccagctgttcgcagtcggcccggtgcacggaaatccctcgcccttgagtaatgaagccgacaatttcatcccccggaatcggctggcagcagcgggcgatgtggtgcatcaaattacccacgccttctaccaccacgcgcccgtcgtctttacgacgattttgcggcgcgtatgttttttgctgaagctgtttcagcgccgctgcatcctgctcctctgcactcggcttattgaactgtgattgcaggaaattcaccatctgattaagacggatatcgccgccgcctatcgccgccagcaactcttccagctcattaaagttgtagcgcggcagcagatgtttttcggcctctttcaggctaatccccaaatgcgccagctcatcgtcgaggatctgccgtccagcctggatatttttgtcacgatcctgcttgcggaaccaggcgtgaattttcgagcgtccgcggctggtcgtcacatagcccaggtttggattcagccagtcgcggctgggattcggctgcttctgagtgataatttcaatttgatcacccatctgcaactgataggtgaatggcacaatacggccgccgattttagcgccaatgcagcggtgcccaacatcgctgtggatgtggtaagcaaaatcgagcggcgtagatccggcaggcaagtcaaccacgtcgccttttggcgtaaaaacgtagacccgatcgtcaaacacctggctgcgcacttcatccagcatttcgccggaatcggccatctcttcctgccaggcgatcagcttacgcagccacgcaattctgtcttcatgaccggagcgcacgccgccggacgcggcgccttctttatacttccagtgtgccgccacgcccagttcggcgtcttcatgcatctgtttggtacggatctggatctcaacggttttaccgcccggtcccaggaccacggtgtggatagactggtaaccgttcggtttcgggttagcgacataatcatcgaattcatccggcaggtgacgatagtgcgtatgcactatccccaacgcggcgtagcagtcctgcagacgttcagcgacaatacgcacggcgcgcacgtcaaagagttcatcaaacgccagatgctttttctgcattttgcgccagatgctataaatatgttttggtcgtccgtagacctccgcctgcacgccttcgtttttcatttcggcgcgcagatgtccaacaaactcttcgatgtaatgttcgcgatcgagacggcgctcatgcagcagtttggcgatgcgtttgtattccgccggatgcaggtagcggaaacagtagtcttccagttcccacttcagttgcccgatgcccagacgattggcgagcggcgcatagatgttggtacattctttcgccgccagcacgcgctcatcttccggcgcctctttcacttcgcgcaaatgagcgattcgctcggccagtttgatcaccacgcagcggaaatcatccaccatcgccaataacattcgacggacgttatcaacctgctccgaagaaacagagtcgttatgagtggcgtttagctgacggatcgccgccatatcgcgcacgccatgaatcagggtaacgatagatttgccgacgctttcgcgcagtacatcttcgctgactacgttggcgtcggccagagggaacagtagcgccgcccgcagcgtgtcgatatccatactcagcgtggaaagaatttctaccatctccacgccacgccacagcaacagatccgcatccggatgtccttgtgtctgttgcaggcaatacgcccaggtttcggctaagcgctcacacgactgctggctggaaattcccaggcttgcgatccacttcttcggatcaaattcaccagctttattaatatgtgcacttcttaccgcgaccatcgtcctctccttaagggaccaggcctaccgaagtcggtaagccggtaatcattacatgcgctcgaacagaaccattgattccagatgtcctgtgtgcgggaacatgtcgagcatcgctaaacgcgtaacctcatatcccgcattgaccagcgcttcactatcgcgcgccagcgtcgccgggttacaggatacataaacaatgcgaataggttttaattttataatatgtcgcatcactcctgtagcccccgcacgcgcaggatcgagtaagactttgtcaaagccgtttttcgcccacggctgcttcgtgacatcttcctccaggttctcatggaagaatgtcacattatgtaaaccattgcggatggcgttttcacggcctttttctaccagcgccggaacgccctcaaccccaatcacgcttgccgcgcgcgttgccagcggcagcgtaaaattccccattccgcagaacagatccaggacacgatcctcggcgcgcacatcaagccactccagcgcgcgggcgaccatttgctggtttaccgcctcattaacctgaataaagtctcgcggactgaaggctaaacgtaagccgtgcgaatcataccagggcgcctcgccagataccgtttccagtatctcgctaaacggcgccagaaacagagacaatccctcagaatgcgaaaagcgttccagtttttctttatccgccgcacttaatggcgcggtatggcgcagaatcatcagcgtaccgcttcccgcctgtaccagctcaacatgcccaagatgtcgggtgccgtgtaaactcgccagacacgccctgattcggggcagcaatgctgcaagctggggcgccaaaacggggcactgttcgacattgacgatatcgctggaacccgctttgcgaaatcccatttgcagcggtttatccggcgggcaattcagacttaaccgcgcacgacgccgataaccccaaggcgcgccggcgatgatgtcattcacctcgtgtttcatcaaacgcgccagcgccgcgcttttgctgcgttgttgcagggcgatgctgacatgctgttgctgacaaccgccgcagacgccaaaatgcgggcagcgcggcgtttctcgttccgggctatcattcaaacggcgcgaaacgcgtgcgcgggcaaattgctttttatcttctgtaataatgacttctgcgctttcctcaggcaataaaccggggataaacagcgcttttccgttatgacgggctacgccctgaccaaatgaatcgaggtcattgactttaacggttatgatctgacgcgtcgtcacgcgccgttttgcagagtagaattgcgccatcgaccagctttttctcaatttaacagtgtgaccctaattgtcccataacggaactccatgaccaactacagcctgcgcgcacgcatgatgattctgatcctggccccgaccgtcctgataggtttgctgctcagtatcttttttgtagtgcaccgctataacgacctgcagcgtcaactggaagatgccggcgccagtattattgaaccgctcgccgtctccagcgaatatggtatgaacttacaaaaccgggagtctatcggccaacttatcagcgtcctgcaccgcagacactctgatattgtgcgggcgatttccgtttatgacgatcataaccgtctgtttgtaacgtctaatttccatctggacccctcacagatgcagcttcccgccggagcgccgtttccacgtcgtctgagcgttgatcgccacggcgatattatgattctgcgcaccccaattatctcggagagctattcgccggacgagtcagcgattgctgacgcgaaaaataccaaaaatatgctggggtatgtggcgcttgaactggatctcaagtcggtcaggctacagcaatacaaagagatttttatctccagcgtgatgatgcttttttgtattggcattgcgctgatctttggctggcggcttatgcgcgatgtcaccgggcctatccgtaatatggtgaataccgttgaccgcattcgccgcggacaactggatagccgggtggaaggatttatgctgggcgaactggatatgctgaaaaacggcattaattccatggcgatgtcgcttgccgcctatcacgaagagatgcagcataatatcgatcaggccacttcggacctgcgtgaaacccttgagcagatggaaatccaaaacgttgagctggatctggcgaaaaagcgtgcccaggaagcggcgcgtattaagtcggagttcctggcgaacatgtcgcacgaactgcgaacgccgctgaacggcgtcattggctttacccgcctgacattaaaaacggagctgaatcccacccagcgcgaccatctgaacaccattgagcgttccgcgaataatctgctggcgatcattaatgacgtgcttgatttctccaagctggaagccggtaagctcattctggaaagtatcccttttccactgcgtaatacgctggatgaagtggttacgctgctggctcactcgtcgcatgataaagggctggagttgacgttaaatattaaaaacgacgtcccggataatgtgattggcgacccgctgcgcctgcaacaggtcattactaatctggtgggtaatgccattaagttcaccgagagtggcaatatcgacattctggtagaaaagcgggcgctcagtaacaccaaagtacagattgaagtgcagatccgcgatacggggatcggcattccggaacgcgaccagtcgcgactgtttcaggcgtttcgccaggccgatgccagtatttctcgccgtcacggcggcaccgggcttgggctggtgattacgcaaaagctggtcaacgaaatgggcggggatatctctttccacagccagcctaatcgcggctcgaccttctggtttcatattaatcttgatcttaacccaaatgtcattattgacgggccgtcgaccgcgtgtctggccgggaaacggctggcttatgtcgaaccgaatgctaccgccgcgcaatgtaccctggatctactgagcgacacgccggtggaggtggtttacagcccgaccttctccgcgctgccgttagcgcactacgatattatgattttgagcgttccggtgaccttccgcgagccgctcaccatgcagcatgaacgtctggcgaaagcagcgtcaatgacggactttctactgctggcgctaccttgccatgcgcaaattaacgccgaaaagctgaaacaaggaggcgcggcggcctgtctgttaaaaccattgacgtcaacgcgcctgttgccagcgctgacggaatattgccagttgaatcaccatcctgaaccgctgctaatggataccagtaaaatcaccatgacggttatggcggttgatgataatcccgctaatctgaagcttatcggcgcgttactggaagataaagtccagcacgtagagctttgtgatagcggacatcaggcggtggatcgggcgaaacaaatgcagtttgatctgattttgatggatattcagatgccggatatggacggcatacgcgcctgcgaattgattcaccagcttcctcatcagcagcaaacaccggttattgccgttacggcacatgcgatggccgggcaaaaagagaagttgctcagcgcgggcatgaacgactatctggctaaaccgatagaagaagagaagttgcataatctgttgctgcgctataaacctggcgccaacgtagcagcgcgcctgatggcgccggaaccagctgaatttatcttcaatccgaatgcaacgctcgactggcagcttgcgctccgccaggctgccggtaagcccgatctggcgcgggatatgctgcaaatgctgattgattttctgccggaagtgcgcaacaaaattgaagaacaactggtgggagaaaatcccaacggcctggtcgatctggtccataagctacacgggagctgcggctatagcggcgtaccgcggatgaagaacctttgccagcttattgagcaacagcttcgcagcggcgtccacgaagaggagctggagcctgagtttctggagctgctggatgagatggataatgtcgcgcgtgaagcgaagaagatattaggctgatattcgccggatggcggcgtgaccgccttatccggcctacaactcagcgtaactgttgccccgctttcagcgttgcagccacgttgcgcgcggtcattcgtacgttttcactcgcattcttcagcgcgtcctccagcgtgcagatggtataaatcacgctgaaaaccgcatcaagcccatgttcatgaaccacgctaacgtccgccgtcaggctacccgcaataccaattaccggcttgttataccgtttggcgatgtttgccacgccaatagggactttaccgtgaatggtctggctgtcgatgcgtccctcgccggtgatgactaaatcagcatccgcaagacacgcttccagatgaagcgcatcggtgacaatctcaatgccacgccgtagctgcgcgccgcaaaacgcgtataacgccgcccccatgccgcctgccgcgccgccgcctgccagatccaacacatcgacatgcagatcgcgggcaatcaaatgcgcatagcgagtcaatgccgtatccaggcgttcaatcatttccggcgtcgcccctttttgcggaccaaaaaccgcagacgcgccctctttgccggtaaggggattcgtgacatcgcaggcgacctctatatggcacgccgacaaacgcttatccaggccgctgatatcaatgctggcgagtgtttccagcccaatgccgccttgcgcaatatcattgccctgcgcatcccgtagcctggcccccagcgcctgtaccatccccgcgccgccatcgttggtggcgctaccgccgataccaataatgatatgctcaacgcccgcatccagcgcatgacggatcagctcgccggttccccatgacgtggtcttcaacggatcgcgttgcgcgggcggcacctgctccagcccgctggcggccgccatttcaatgaacgcggaacgcgcatcgccggaaagcccataaaacgcattgacgcgatgccccaacggcccggtgacctcaacatgcacgattcgacccgccgtcgcttcaaccatcgcttcgacagtaccttctccgccatcagccagcggcaatttcaggtaatcggcgtcaggccagatctcgcgaaatccttgttcaatggcggtcgctacctcaagagcactcaaactttccttatacgagtctggtgcgatcactattttcataagtcgtccttacgcatgttgatcctgttaagcatacacccagagaagaaccggttccttacggaaccggctctgacttaacgcaccatgcaaggacgcttattatcaaacgtccagccaggaattaagtactgcattcccatcgcgtcgtcacgcgcgcctaagccatgtttttgatagagctcatgcgctttcatcacctgatccatatcgagctcaacgcccagacccggtttggtcggtacttgcaccatgccgcctttaatttcaaacggttctttagtcagacgttggttgccttcctgccagatccagtgggtatcgatcgcggtgatcttgcccggcgccgccgcggcaacatgggtaaacatcgccaacgaaatatcaaagtggttgttagagtgcgagccccaggtcagaccgaactcatggcacatttgcgccacgcgtacagagccttgcatagtccagaagtgcgggtccgccagcgggatatcgacggattgcagcgacagcgtatgccccatttgacgccagtcggtcgctatcatattggtggccgtcggtaatccggtcgcgcgacggaattccgccatcacttcacgaccagaaaaaccctgctccgcgccgcacggatcttctgcataggccagagaacctttcaggtatttaccaatgctgatcgcttcgttcagcgaccaggcaccgtttggatcgagcgtaacgcgcgcttgtgggaaacgtttcgccagcgccacgattgactcggcctcttcttcgcccgccagcacgccgcctttcagtttgaagtcgttgaagccgtatttttcataggcagcttccgccagacgcactaccgtttccggcgtcatcgcctcttcatggcgcagacgataccagtcgcattgctcatccggctggctctgatacggcagcggcgtggccttgcgattgccgacaaagaacagataacccagcatttcgacttcgctgcgctgctgaccgtcgcctaacagcgaagcgacgttgacgcccaggtgttggcccaaaaggtcaagcattgccgcttcaatgccagtcaccacatggatagtggtacggagatcgaacgtttgtaagccgcgtccgcccgcatcgcgatcggcaaactggttgcgaacggcggtcaggacatttttatattcacccagcgtttttcccaccaccagtgggatcgcatcttccagcgttttgcgaattttttcgccgcccggaatctcgccaaccccggtatggccggagttatctttaataatgacgatgttgcgcgtgaagaacggggcgtgcgcgccgctcaggttcatcagcatactgtcatgacccgcaaccgggataacctgcatttcagtcactacaggcgtcgtaaattgagtactcataactgtgtccttattcagaattagtgacgaccaaaaacagggcgtttgcggtcaaaagtccagccggggatcaggtattgcatcgggcctgcatcattacgcgcgccgcctggcagctttttatacgcgtcatgcgcttttcgcacctgttcccagtcaagctccacgcccagtcctggcgcatccggaacggcaattttgccgtttttaatttccagcggatttttagtcaggcggcaatcgccctcctgccagatccagtgcgtatcaatagcggtgggtttgcctggcgccgccgcgccgacatgggtaaacatcgccagtgaaatatcaaaatggttattcgaatggcagccccaggttagcccccagtcatcacacagttgcgccacgcgaacggcgccggtgagggtccagaaatgcggatcggcaagaggaatgtctaccgcgttgagcatcaccgcgtgtcccatttcacgccagttggtggcaatcatattggtcgctaccggcagtcctgtcgcgcggcggaactccgccatgacttcacgaccagagaatccttgctccgcgccgcacggatcttccgcgtaggtcagtacatcattcagccctttgcacaacgcaatggcttcatccagtagccaggcgccgttcggatccacggtaatacgcgcgtccgggaagcgtttttttagcgcgcgaacagtatcaatctcttgttcgcccggcagcacgccgcccttgagtttaaaatctttaaagccgtagcgatcctgagacgcttccgccagccgcacgaccgcgtcgctgtccagcgcttcctgatgacgcaggcgataccattcatgactgcccggcgtgctttccagatacggcagatcggttttagtgcgatcgccaatatagaagagatagcccaacacggtgacggcatcgcgctgtttaccgggtcctaacagttcacagaccggcacattaagcgcctgccccagtagatcaagcagcgccgcttccaaagctgccaccgcgttaacccgcagttcaaacgtccatgcgcctttaccaaaggtgtcaaaatcagcagcctggttgcctttatgcacctgctgcaccactttgttcaggcgggcgacttcctggcctaataccatcggaatagcatcgaccagcgtctgataaatcacttctccgcccggcgcctcgccgacgccagtatgcccggcgttatcggtgaggatgacgatgttacgggtgaagtacgcgttatgcgcgccgccgatgttgagtagcatactgtcatgtccggcaaccggaatgaccttcatgtccgtaataacgggactggattgcgttgtcatgataattgtcctgcgacaggtttcagttcaatacgcttaatatcgcctaccagcaccagatagctgatgatggccaccagggcatgtacgccgacatagatcaacgcgccgttgaaggaaccggtggtgccaacgatgtaaccaatcgcgattggcgtcacaataccggaaatattgccgaacatattaaacaagccgccggaaagaccgctgatctctttcggcgcggtatccgccattactgcccagcccaacgcgccgatacctttaccgaagaaggccaacgccataaagccgatgatcatccattccacgttcacatagttacagaacaccatgaccattgacagcaacatccccagcacaatcggcgtcttgcgcgcgatattcagggagccggtacgacgcatcagccagtcggaaatgatgccgcccaacacgccgccgataaagccgcagaccgcaggaaccgaggcgacaaagcccgctttgagaatcgacatgccgcgcgcctggaccaaatagaccgggaaccaggtaataaagaaataggtcaatgcgttaatacagtactgaccgatgtaaacgccaatcatcatacgagagcccagcagctgtttgatctggccccatttgacgctaaacggtactttcgctttggtgtctttctgatccatattgatcagcgcgccgccttctgcgatgtactccaactctttcttatttacgcccggatggttatttggttcatggataactttcaaccagataaagctgatgatgatccctaacccgcccataaagaagaagacatgcgaccagcccacttcgtgcgtcagccagcccataatcggcgcgaaaataaccgtggcaaagtattgcgcggagttaaagatggccaccgccgttcccctctcctgcgccgggaaccaggctgcaacaatgcgactgttgcccgggaaagaaggcgattccgccagaccaaccaggaaacgaagcgtaaagagggcgacaataatgccgaaaccactaaagatatcgacaaaaccctgcaacagggtgaagactgaccaaatgaaaatagaccagaaatagacgcgtttggaaccaaagcggtccagcagccagccgcccgggatctgcccgataacataggcccatgaaaaagcagaaaaaacatagcccatgcctaccggatcaaggccgatatctttggccatttctgagccggcaatggacaatgtggcgcggtcgccgtagttgaaggatgtgacgataaacagcatcaccactatccagtagcgggcgttcgtgcgtttctccgcactgctcgccgcgtgacttaatgaactcattgttgcactcctgaaatttcgcgttagctacgctcactctgaactgcacaaccggtagggaatcagagataacgtttccttgttgcagcttttattaggtcgtttgctttgcacgctgcatgcttttattcactggcaggagaagtataaaaagcgcgccacacacactcaccgtgcaacaacacagtattttggcgatgaattacgcctgtttatggcaaaagcccaggacagtggaagccacttcacggaaatgaaatcagaaggcgtcggcgtcgacgcaggaggagtaaaaagagaagaatgtgaaacaggtcgcttgattacatgaaaacgcccgtaaaaaactgctgcttttgcgggcatatgcacaaagctaacacgattcagttactttacactgtgtacaggtcatgattttgcttactggcaacgcaagcaaacgaaaaggtaccctcccgtaggggggagggatttacctcaggaaagtaaagttccccagttttcaacccagggattggactggctctccggctccggatgttcgctggcgtcaatgaataacatctcccccacccgctgcgcgctttgctcttgcaacagggcatcaaactgtttgccgccattacagaaattggggtagctgctatcacctaacgcaatcaccccgtaacgcaggtttggttgaaaaccgactgtatctttaatgccgtgaaagagcggcgcaatgctatccggtagatcgccctgcccggtcgtcgaggtaacgaccagcgcaaccttatcctgatattgctgccagtcggacagttcaggatcttcaaacacggtcgcgctgtggccctgtctggcgaggatcgcttccgcttcttccgccaccagcagtgagttgccatacatggtcccgacaaaaataccaatttccgccattatgcgtatctccctgaattatgtcagatgagtctcatcctgccgggacgccgccgtaaactcaaccctttcattgtcagggagaagtccacgccagccaaactgcgtcagcgcctgcatccaggtttcatccaacccggcctgaattatcaacggctgtccggtgaaggggtgcgtcagttcaagacgactggcatgaagcatcaggcgacgacaggcaaaatgctctgcggcgctgcggttttgtcgcaaatcgccatgtttactgtcgccgatgataggatgacgcagatgcgccagatgacgacgaagctggtgcttgcgtcccgtttttggttccagctcaaccaggccataacgcgtggtgggataacgcccggtcggcaccgccatttcgaccgtcgccagcccgcgatactgcgttacggccggctggggcgctttatcttcgcgggcgaatttatcggcaattttatcgcgctcttccaccagcggataatccagtaccgcgtcatccatcagccagccgcgcacaatggcatggtagcgtttacggatgtggtgctgctcgaactgctgcgccagacggcgtcccgcttcgctggacagccccattaacagtacgcccgacgtgggcctgtcgagacggtgggcggtaaaaacatgctggccgatttggtcgcgcaccgtttgcatgaccacgactttttcgtcgcgatccagccagctccggtgaacaagccagcctgcgggtttattcacggcaaccagccacgggtcttgatagaggatctccagcatcaggatttatcgcgggcgaatagcgcatccagatcctgcaaaaccgccaggatcgtctcccgctgcggatgatccgccgccagcgccatttcataataaggggcgacggcaaacgcctcgggcagcggctgcgcattatcaagtagggtatgcatacgtgggatcaatacccattgcagccattccagcggttccatggtatccataaaaaatggttgggtgctggtaaacaggtgcgcctgcggcgcatcctgccgccagtggcgatgctcgcgcagcagcgtttcaagcgtatgtaactgctgacgcacacggtcatgagtcgtcatgttaaaaacctcaatgatgaaaatctggcgcgaagaataacaaaaaaaagggagcactgtataaacagtgctcccggttcgtttcgcagcattccagctacttttcgtgctccctgctcatccgtgacaacttttcctgtgaccttacggcctgttcatcctgaacgtttgcatcctgcgcacatcgcccgatgtgatagcttcttcctgaagcgtccctggtcatccagacccgccgaacatcctgatcggctctcgttctccgtcctggaggtgtcctttaacgcatcctgcgctttccactttgcttcatcctgaagcctttccttgtaacaccatcctggcgtgtcctgctgaagcgtcatcatcctgacgttcgcttcgttgtacgactccctgtcgacgaagatagaatcgcctgtttcaccttgtcttacaagacgcttacagacaataccttaagtaaattttcatatgaaagtgcgcaaaaacattttaattagttgttttatatagacttacataagaaaacggggctcagtatccgctgatatcctggcgatctcctacagactttgtaagagatctctcacacctgttagggcaaacgattacagaagaggattaagttgcgtaaggaattccgcaagcgttgcggcaagaacggtacgattgcgggtgcccagcgtttctttaatcacctcgccggacagattacagaccgaaatgacctcaagctcattttcctgcgtcgcaataaaaagcgtgggaggaagcttgagccgcttttgcgtgaccaggtggcctatcagattttcctgcacgcgccgaaagtcatcctgactccaggtttgcagtagcgtaagcttttcatccgcaaactgcgcgggcatgtcgccagcaaactgcgtggtgtaaaacgcgtggagcgcaggttgtaccataatatcaaaggcgcgttcaaccgcgtttacattttcttcgccttcaaaaggttgcggctgccagtaaacggcatcgcgggttgaagaaataatgcacggagaaggtacgccatacagttcttcgctcaacggccagctaccgtgtttttcttgccacgcatcgcagtaacgcgtcgtaaaggctttcaatgcctgcgctgtcagttcgtccaccagtttctctcttcataaaagccaggatacacttggcgcatagtgtatctggtttatgacggtgaaacatgtcttcttatgaaaaccatcaggctcttgatggcctgactctcggaaaatcaacggattaccgggacaattatgacgtcagcctgctgcagggcgtaccgcgcagtttgaatcgtgacccgctcggattaacagccgataatttgccgttccacggcgcggatatctggacgttgtatgaactttcctggcttaacagccagggtcttccgcaggtcgccgtcgggcatgtcgaactggattacaccagcgttaatttaatcgaatccaaaagctttaaactgtatctgaacagctttaaccagacgcgctttgacacctgggagacggttcgccagacgctggagcgcgatctgcgcgcctgcgcgcagggcaacgttagcgtgaggcttcatcgtcttgatgagctggaaggacagcctgtcgcccatttccacggcacctgtattgacgatcaggatatcagtatcgacaactaccagtttactaccgactatctgcaacatgcggtcagcggcgagaagcaagtagaggagacgctggtcagtcatctgttgaaatccaactgcctgatcacccaccagccggactggggctcgatacaaattcagtatcgcgggcgcaaaatcgacagggaaaaactgctgcgttatctggtctccttccgtcaccataatgaatttcacgaacagtgcgtagagcgtattttcaatgacattctgcgcttctgccagccggaaacgctaagcgtttatgcgcgctatacccgccgcggcgggctggacattaatccctggcgcagcaataccgatttcgtgcccgccacgggcaggctggcgcgacagtaatttttttgtcaattttgcgtgccggattgcgcatgtaaggttgtgaaaggtcatcagccagggctattgtaatcaacagggaatggcgtgttgcgtcccataaggagtttacttgattacacatattagcccgcttggctcaatggatatgttgtcgcaactggaagtggacatgctgaaacgcacggccagtagcgacctgtatcaactgtttcgtaactgttcacttgccgttcttaactccggcagcctgaccgacaacagcaaagagctgctgtcccgctttgaaaatttcgatattaacgtactgcgccgcgagcgcggcgtgaagctggaattgattaacccgcctgaagacgcttttgttgacgggcggattattcgtgcgctacaggctaacctgttcgcggtgctgcgcgacattctctttgtgaatgggcagatccacaatgccggccgtttccagcatctggatcttgaaagctcaacacatatcaccaatctggtattctccattttgcgcaacgcccgggcgctgcacgtcggcgaagcgccaaacatggtggtatgctggggcggccactcaattaacgaaaacgagtacctgtatgcccgtcgcgtcggcacgcagttgggattacgcgagctgaacatctgcaccggctgcggccctggggcgatggaagcccccatgaagggcgcggcggtcggtcacgcacagcagcgctataaagacagccgctttatcggcatgactgaaccttccattattgcggctgaaccgcctaacccgctggtgaacgaactgatcatcatgccggatatcgaaaaacgcctggaagcgttcgtccgtatcgcacacggtatcatcatcttcccgggcggcgtgggtacggcggaagagctgctttatttgctggggattctgatgaatccagccaataaaaatcaggtgctgccgctgatcctgaccggaccaaaagagagcgccgattacttccgcgtgctggatgagtttattacccatacgctgggcgaagcggcccgccgtcattaccgcatcatcattgacgatgcggcggaggtagcgcggctgatgaagaaagcgatgccgcaagtgaaagagaatcgccgcgatactggcgacgcctatagttttaactggtcgatgcgtattgcaccggatctgcaggtgccgtttgagccgtcgcatgagaatatggccaacctgaaactgtacccggatcagccggttgagattctggcggcggatctgcggcgcgccttctccggtattgtcgcggggaacgtgaaggaggtcgggatacgcgccattgaagctaatggtccgtataaaatccacggcgatcgagagatgatgcgtcgcatggacgatctgctgcagggattcgtcgcgcagcatcgtatgaaattgccgggttccgcctacatcccctgttacgagatctgcgcttaacgcttatgcccggttgccgccagcagccgggcgcttctcccattcctttcattgcggtatggcgattcacgtatgccttcattttttatgatgatcatcagaggcatagcccgcattgttttataaacaccatttataattcaccataaatagattgccaggcaaacgtttacctgactcctcttaccgtgatttatcggttcaaactctcattcttcgcaagaatccactaaaaaccttgatttttatagtcaaacctccgtatcttgcgccccaatctttccggccttatatcgttaatggtagccttcgcgcccggaaattcgttatgacgtttttttaatagattaatggtccaaatttatccatgtaagaagcggattattgcatttgagatcgggatcactgatagattcatcacttaaatgtatctttccgcccgaaaattattacggcgaaaaattatataaaaagcgtccctaagcagatttcattttacgatcaggtcttttttcattggattagaccagcaacctgatttttagcatcctccaggagaaatagatggaaaccactcagaccagcactattgcttcgattgactctcgaagcgcatggcgcaaaacggataccatgtggatgctgggcctttacggcacggctatcggcgcgggcgttctgttcctgccgatcaacgcaggcgtcggcggcatgattccgctcatcatcatggcgattctcgctttcccgatgacctttttcgcacaccgtggtttaacccgcttcgtgctgtccggtaaaaatccgggtgaagacatcactgaagtcgttgaggaacacttcggtatcggcgcaggtaaactgattaccctgctttacttcttcgcgatttaccccatcctgctggtttacagcgtggcgattactaataccgtggaaagcttcctgacccaccagttagcgattaatccgccgccgcgggcgattctttccctgatcctgattgttggcatgatgaccatcgtgcgcttcggcgagcaaatgatcgttaaggcgatgagtatcctggtattcccgttcgtcgctgcgctgatgctgctggccttgtacctgatcccgcagtggaacggcgcggcgctggaaactctgtcctttgattccgccgcgtctaccggtaacggtctgtggatgacgctgtggctggcgattccggtgatggttttctctttcaaccactccccgatcatctcctccttcgcggttgcgaagcgtgaagagtacggtgaaggcgctgagaagaaatgttctaaaattctggccttcgcccacatcatgatggtgctgaccgtgatgttcttcgtcttcagctgcgtgctgagcctgacgccggcagatctggcagcggcaaaagagcagaacatctctattctgtcttacctggcgaaccattttaacgcgccgatcatcgcctggatggcgccgatcattgcgatgattgctatcaccaaatccttcctcggccactaccttggcgcgcgtgaaggctttaacgggatggtgattaaatcgctgcgtggtaaaggtaaatccatcgaaatcaacaaactgaataaaattaccgcgctgttcatgctggtcaccacctggattgtggcgacgctgaaccccagcatcctgggcatgattgaaaccctgggcggcccgatcatcgcgatgattctgttcctgatgccgatgtatgccatccagaaagtaccggcaatgcgtaagtacagcggtcatatcagcaacgtattcgttgtgattatgggcctgattgccatctccgctattttctactcactgttcagctaagtcctttagcgccgcttaccgcggcgcttctctatgatacaaccgcaatggatgccctatgattagcgtattcgatatttttaaaatcggcattggcccttccagttctcacaccgtcggaccaatgaaagcaggcaagcagttcacggacgatctgattgcccgccatattcttacagatgtcacccgcgtcgtggtggatgtctacggctctctgtcattgacgggtaaaggccaccacactgatatcgccattattatgggcctggcggggaatctgccggacaccgtcgatatcgacgccattccgtcctttatccaggatgtgaacacccatgggcgtttactactggctaatgggcagcatgaagtcgaatttccggtcgataagtgcatgaatttccacgccgacaacctgtctctgcatgagaacgggatgcgtattaccgcgctggcgggcgataaggtgctctacagccaaacctactactccatcggcggcggctttatcgtcgatgaagagcactttggtttgacgaatagcgaacccgttaacgtaccgtacccttacaaaaccgccgcggatttacagcgccactgccaggagacgggtttgtcgctctccggtctgatgatgcaaaacgaactggctctgcacagtaaagaagcgctggagcagcacttcgccagggtctgggaggtgatgcgcagcggtattgagcgcggtatcaccaccgagggcgtattgccgggcaaactgcgcgttccgcgtcgcgcggcggcgctgcgtcggatgctggtcagtcaggataagaccaccaccgatccgatggcggtcgtcgactggatcaatatgttcgcgctagcagtgaacgaagagaatgccgcaggcggacgagtagtcactgccccgactaacggcgcatgtggtattgttccggcggtgctggcgtactatgacaagtttatccgcgaagtaaatgctaactcgcttgctcgctatatgctggtcgccagcgcgattggctcgctgtataagatgaacgcctctatttccggcgccgaagtgggttgtcagggagaggtcggcgtggcctgttccatggcggcagcgggtctggccgagctgctgggcggtagcccggcgcaggtgtgcatcgccgcagaaatcgccatggagcataatctggggttaacttgcgatccggttgccggtcaggtacaggttccctgcattgagcgtaacgcaattgcttcagtcaaagcggtcaacgccgcgcgtatggcgctgcgccgtaccagcgaaccgcgcgtatgcctcgataaagtgattgagaccatgtacgaaaccggtaaagacatgaacgctaagtaccgcgaaacttcgcgcggcggcctggcgatgaagatcgttacctgcgattaattctcagcacattttaggatctgtaagccggataaggcgctcgccgccatccggcttttgttgcctgatgtcgcttcgcttatcaggcctacggatagcgctatttcgcaatgctcgcctccccccgccgtgaatgttaccctacgcgcaggtttgtaagggagaacaccgtggctgctcatctgcttatcgtcgacgcgctcaatttgattcgccgtattcacgccgttcagggatcgccctgtgtggaaacctgccaacacgcgctcgatcaattgattattcacagccagccaacccatgccgtagcggtatttgatgacgacgcgcgcagcagcggctggcgtcatcagcgtttgccggactacaaagcaggacgtccgccgatgcctgacgatttacataatgaaatgcccgccctacgcgccgcatttgaacagcgcggcgtacgctgttgggcatcagacggtaacgaagcggacgatctggcggcgacgctggcgctaaaagttaccgaagccggacaccaggcaaccattgtgtcaaccgataaaggctattgccagttgctctctccgggattgcgcattcgcgactacttccagaaacgctggctggacgcgccgtttattgaaaaagagtttggcgtacttccccggcagttgccggattactggggtctggcaggaatcagtagttcgaaagttcccggcgttgccggtatcggccccaaaagcgcgacccagctattgattcagtttcaaaatctggagggaatttacgcccatctggacgaggtgccggaaaagtggcgcaaaaagcttgagacgcataaagaaatggcatttctttgccgcgatattgcacgtctgcaaaccgatttacatatcgacggaaacttacagcagctacggctggcgcggtagttttgttgccggatggcggcgtgaacgccttatcctgcctacaggactgcacgaaatgtagagcggataagcgcagcgccatccggcaaaattaccaggcggtatgatacagttcgacaatgtccgccagactcgcttcacgcggattgccgcccgtacagacatcatcgaacgccgcctgcgccagcgccgggatatcctcttttcgaacgccgacatcacgcaaatgcagcggaattcccacatcgcgatttagcgtaaatacggcttccactgcggcattacgcgcctcttcaaggctcaatccttctaccttcacccccatcgcccgggcgatatcacggaatttctcgttggtagacccggcattgaaacgcatcacatgcggaagcaaaatagcattcgcgacgccgtgtggcgtgttgtaaaacgcgcccaacggatgcgccatcccatgcaccagccccagccccacattggaaaaccccatcccggcaacgtattgccccagcgccatcgcctcaccggcctctttttctccggctacggcgccgcgcagcgcgccagcaataatctcaatggctttgatatgtaatgcatccgtcagcgcccatgcggcccgggtaatatagccttcaatagcatgggttagcgcatccacgcccgttgccgctttcagcgcgggcggcataccgtccatcatatcggcatcgataaatgccgcctgcggaatatcatgcggatcgacacaaacgaatttgcgccgtttctcttcatcggtaatcacataattgatagtgacttccgccgcggttcccgccgttgtcgggatcgccataatcggcacgctgggtttacgggtcggcgatagcccttccagactgcgcacatcggcaaattccggattgttactgataataccgatcgctttgcaggtatcctgcggagaaccgccgccaatggcgatgagatagtccgcgccgctttgggtaaagaccttaagcccttcctggacaacggaaatcgtaggattagggatcacgcccgcatagatctcccacgccagccctgcggcatccattctgcttgtcactttatcgaccacaccgcattgcaccagcgttttatcggtaacaatcagcgctttatgataaccgcggcgcgtcacctcatcggttaatgcgtccaccgctccccggccaaaccatgccgtttcattcagaatcattctgttcgccatcgcctgtctcctgacatcactcttcaatacgtaatccgtaagttttaaatttctccagtacgatagcgatcgcctcgtcatccagtaccggtaccggatcgacaatggccagcgtacttaaatagagctgcgccagcacttccacttcatgcgccagccacaacgctttgtctaaattttcttcacaagcgataagcccgtgatgctgtaacagcgtcgctttacgatttttaagcgccacggcaacatggtcagaaagttcgcgggtgccaaaagtggcgtagggcgcgcagggaatagagtttcctcctgcggcggcaatcatgtagtgaatcgccggaatcgggcgattcaggatcgagactgccgtacaatggacagcgtggttatgtaccacggcattggcgtcagggcgcgtctggtatgccgccatatgaaaacgccactcgctggaaggcagcttgccctgctcatgctgaccgtcagcatcaataaagacaatgtgcgactctgtcagcttctcgtaggggatccccgtcggcgtaatcagcaatccgccctgataacgtacgctcacgttacctgccgtcccctgatttaaccctaaccgcgtcatttccagacaggtatcaataatctgccgcgccagtctatttcgttccattatttacctctctctgtgattcaaaatgagacaacaaaaccgcctttcgcattgcgctgctgtcctgttgaaataatcgaatagttagcaactatcatcatactgaataaagagaagggaatttaaataacgatattttgtgattcacatcaattaattcgccacgataaaccagacgactaccgtttctctcgccgataaatgcccgctcttaataatattttttaaaacgggcaaagatgaagaataagttactactgcccgttttcgtggcaataatttaattcgggcattcagcctgtggttttttaaattaaacatctcaaacggtcattttttatgaaaattaaagtgatgataatcacagaacgctatgctctcaggtataaatgtgaccgccatcatattaaaaggccttttttatttgaaaatgactccatgagttcattccggacgccaatttattaccggtaagaaaagcgaactcacctaattttacggtctggtgaccagaaccgaccgcacgcaaaagcttctgaaccgatgaggatgctatgggaaacacaacaatacaaacacagagttttcgtgctgtggatgcagagcaaagcaaaagcaagcgctacattattccattcgccttactttgctcgctattttttctgtgggccgtcgccaataatctgaatgacattttattaccgcagtttcaacaagcttttacgctaactaactttcaggccgggcttattcagtcagccttttatttcggttatttcgtcattccaattcccgctgggattttgatgaaaaaactcagttataaagcagggattatcaccggactttttttgtatgctgttggcgccgcattattctggcctgcctccgagataatgaattacacattgtttttaattggcctgtttatcatcgccgccggtttaggctgccttgaaactgcggccaacccttttgttacggtattaggtccagaaagcggcggacatttccggcttaatctggcgcaaacttttaactcctttggcgctattatcgccgttgtgtttgggcaaagccttattttgtctaacgtgccgcatcaatcgcaagaagcgcttgataaaatgacgccggatcagcttagcgcctataaacacagcctggtgttatcggtacaaacgccatacatgattatcgtcgccatcgtattagtagttgcgctactgattatgctgaccaaatttccggccctgcaaagtgacgatcatagcgatgctaaacaaagctctttcttatcttctctctcccgactcatccgtatccgccactggcgctgggcggtgctggcgcagttctgctacgtgggggcgcaaaccgcctgctggagctatctgatccgctacgccattgaggagatccctggaatgacgcccggtttcgccgccaattacctgaccggcacgatggtgtgcttctttatcggccgtttcaccgggacctggcttatcagccgcttcgcgccgcataaagtgctggccgcctacgccctgtttgccatgctcctgtgtctgatttccgcctttagcggcggacatatcggcctgctggcgctgacgttgtgtagcgcatttatgtcaatccagtacccgaccatcttctcgctgggtatcaaaaatctgggacaggacactaagtacggctcgtcttttatcgtcatgaccatcattggcggcggtattgtcacgccagtaatgggcttcgttagcgacgccgcaggcaaaatcccgaccgccgaactggttccggcattgtgctttgccgtcatcttcatttttgcccgtttccgttcacaagcggcgacaaactgaacatttatccgaataacgtgaggaatctgtcatgaaaaaaatcagcttaccgaaaatcggtatccgcccggtgattgatggacgtcgtatgggcgtacgcgagtcgctcgaagagcaaaccatgaacatggcgaaagcgacggcggcgctcatcaccgagaaaatccgccacgcctgcggggctcaggtggagtgcgtcattgcggatacctgtattgccggaatggcggaatccgccgcctgtgaagaaaaattcagtagccagaacgtgggcgtgaccattaccgttacgccgtgctggtgctatggcagcgaaaccattgatatggacccgatgcgtccgaaagccatctggggctttaacggcacagagcgtcctggggcggtttaccttgccgcggcgctggcggcgcacagccagaaaggcattccagcgttctccatttatggccatgacgtgcaggatgccgacgatacctccattcctgccgacgtcgaagaaaaactgctgcgttttgcgcgggcagggttagcggtagccagcatgaaaggcaaaagctacctctccgtcggcggcgtgtcgatggggatcgcgggttccattgtcgatcataacttctttgaatcctggctgggcatgaaggtgcaagcggtagatatgaccgaactgcgccgccgtatcgatcaaaaaatttatgatgaggccgaactggagatggcgctggcgtgggcggataaaaacttccgctacggcgaagatcagaacgcctcgcagtataagcgcaatgaagcccagaaccgcgcggtgttaaaagagagcctgctgatggcgatgtgtattcgcgacatgatgcagggcaacaagacgctggcggacaaagggttagttgaagaatcgctgggctacaacgccattgccgccggcttccagggccagcgccactggaccgatcaatacccgaatggcgataccgccgaagcgctgctcaatagttcttttgactggaacggcgtacgcgaaccgtttgtcgtcgccaccgaaaatgacagtctgaacggcgtagcgatgctgttcggccatcaactcaccggtaccgcgcagatattcgccgacgtgcgaacctactggtcgccggaagccgtagaacgcgtcaccggccaggcactcagcggcctggcggaacacggcattattcacctgattaattccggttctgccgctctggacggtgcctgtaaacagcgcgacagcgaaggcaagccgaccatgaaaccgcactgggaaatcagccaacaagaggcggatgcgtgtctggcggccaccgaatggtgcccggcgattcacgaatacttccgcggcggcggctactcatcccgtttcctgaccgaaggcggcgtaccattcaccatgacccgcgtgaatatcatcaaaggcctggggccagtactgcaaatcgccgagggctggagcgtcgaactgccgaaagcgatgcacgatcagcttgatgcccgcaccaactctacctggcctactacctggtttgcgccgcgtcttaccggcaaaggcccgtttaccgatgtctattcggtgatggcgaactggggcgctaaccacggcgtactcaccatcggccatgtaggggcggactttattactctcgccgcgatgctgcgtatcccggtatgtatgcacaacgtggaggaggcgaagatctaccgtccttccgcctgggcggctcacggtatggatatcgaaggccaggattatcgcgcctgccagaattatggcccgctgtataaacgttaatgcggcttaggccggtggcgcaggtttaccgggactacgggcgcgtgaaccgtaggccggataagcgtagcgccatcgggcggcgtttatggagttatctatgaaacaagacgttatcctggttctcgactgcggtgcgacaaacgttcgggcgatcgccgttgatcgccaggggaaaattgtcgcccgcgcctcaaccgctaacgccagcgacattgccgcagaaaatagcgcctggcatcagtggtcgctggacgccatcctgcaacgtttcgccgattgttgcaggtcactctccagcgccctgtcggagtgtgttgttcgcggtattacggtgactacgttcggcgtcgatggcgcgctggtcgatgcgcagggcaagctgctctacccggtcatcagttggaaatgcccgcgaaccgctgccgtgatggaaacgattgagcgctttatctcgccccggcaattgcagacgctctccggcgtcggcgcgttcagctttaacacgctgtataaactggtctggcttaaagagaatcatccgcgcctgctggaacaagctcactgctggctgtttatctcgtcgctgattaaccaccgtctgaccggcgagtttacgaccgatatcactatggcaggcaccagccagctcctggatatccatcagcgcgactttagtccggaaatcctgcaggcgacgggcctggcgcgccgcctgttcccgcgtatcgtggaagcgggcgccccgataggcacgctacagacagacgcggccaggctactcggtctcccggcgggtgtgccggtgatctctgccggacacgatactcagttcgcgttattcggcgctggcgcgcagcaaggtgaaccggtgctctcctccggaacatgggagattctgatggtgcgcagcggtcaagtggatacctcgctgctcagtcagtatccgggctcgacctgtgaactggacagtcagtcggggctttataaccccggaatgcagtggctggcctccggtgtactcgaatgggtacgaaaactgctgtggacgccggaaacgccatggcaaacgctgatcgacgaagcgcgcgctattcccgctggcgcggaaggcgtacggatgcagtgcgatctgctcgcctgccaaaatgcaggctggcagggcgtgacgctcaataccacccgcggccatttctatcgcgccgcgctggaaggcctgacggcgcaacttcagcgtaatctgcgcacgctggagaaaatcggccattttaacgccacagaactgttactggttggcggcggcagtcgcaacgctttatggaatcaaattaaagcgaatcagcttgatatccctatcaaagtgctggacgacgcggaaaccaccgtggccggcgctgccatgtttggctggtacggcgtaggcgaatttagtagcccggaacaggcgcgcgcgcaggtcaattatcagtatcgttatttctggccgcaaaccgaacctgaaattattgagggagtatgaaatgctaaaaaccatttcaccgttaatttccccgacactgctcaaagtgctggccgagatgggccacggggacgaaatcattttttccgacgctcactttcccgcgcatagcctgggcccgcaggtgattcgcgccgatggtcttagcgtcagcgatctactgcgggcaattattccgctctttgagctggatagctacgccccgccgctggtgatgatggccgccgtggaaggcgacacgctcgatcccaacgttgaagcgcgctatcgcgatgccttgtcattagaagcgccgtgcccggatatcgttcgtatcgaccgctatgcgttttatgagcgggcgcaaaaagcgtttgcgatcgttatcacaggtgagtgcgcgaagtacggaaatattcttttaaaaaaaggggtaacgccgtaatctcttgccggtgcgcccgcatgacgcgggcgttcatcgaatgatggggtgagaaaaatgaaagcggcacgccaacaagcgatagtcgatctgctgatcaatcataaaagtctgaccaccgaagcgctggccacccggcttaacgtcagtaaagagaccatccgccgcgatctcagtgaactacagacgcagggaaaagtgctgcgtaatcacggacgagctaaatatattcatcgtgaaaatcaggacagcggcgatccattccatatccgcctgaaaagccattatgcgcacaaagccgatattgcccgtgaagcgttagcgtggatagaagaaggaatgacgattgcgctggatgccagttcaacctgctggtatctggcccgccagttgccggatattcccattcaggtttttaccaatagccatcctatctgtcaggagctgggaaaacgcgaacgcattgcgctgataagttccggcggccagcttgaacgtaaatatggctgttatgttaatccgtcgcttatctcacagctaaaatcgcttgatatcgatctgttcatcttttcctgtgaggggatcgacggcggcggcgatctgtgggactccaatgcgatcaacgccgattttaaatctatcctgctcaggcgcgcctcgcagtctttattattgattgataaaagtaaatttaatcgttcaggagaggcgcgcatcggccatctggatgacgtgacgcatattgtttcagatgcgccgcaatcgtagaccggataagcgtgcgtcatccggcgctgatgacgcgccggacgacggcaacgcgtttttatcgctcgtcgcgacgtccgccaacagccgcccacaaccgacgcacgtgtaccgtcacttcttcgcgatcgtgataaagctgacgcgcctggatctgcgcattaacgccgtgctcatccaactgcgcctgaagatacgccaggttatgcgacacctcttcatagcgttttttcatcggcagtttaaggttaaaaatcgtctcccgacaccagccgttcaccagccactgcgccattaacgcggtgactttggccggcttctccaccatatcgcagaccatccatgaaatattattccggttcggacggtacctgaagccatcctcacgcaaccaggtcacctgtccggtgtccatcaggctttgcgccatcgggccgttatctacggagtagacccacatattgcgcttcactaactggtacgtccatccgccgggacaggcgcccaaatccaccgcatacatgccgttcgccagacgttcatcccactcatcttccgggatgaaaacgtggagcgcctcttccagtttcagcgttgagcgactcggcgcatcagacggaaacttcaaacgcgggatgcccatataaaacggtgaattgttatgcgcgaacgaataaccggtatagcagcatcctggcgcgataaaaaagacatgaacgaccggacgcttcggcgtttcataattcgtcaatacgcccgcatcacgcaaagccgcgcgcagcggcaccgtaaatttgcggcagaacttcatcagttctttactttcattggtgtcggcgacttcaactcgcagctcgccgcccttttccactacgccctgcaacatgccgacaatcggcgtaattctgtcttccggcggtaaatgttgcagcagttcacccaccacaaaccactggcgggcgaaaatcagcgaactgaacggcagttctgaaatcagcttttcgccatcttccggctggtagcattcataaatgacatagcctgcgttctcttttacgcgtgcaaaaccaaatatttcccgttttcccgctttatcggtaatttctgcagcgcactctttttcaaaccccggacggcagagcaatacaactttattcatggctcgcgcccttacgtttcatacgaatggcgccaatcagcaatagcgcccagcccaccaggaaactgacgccgccgacaggcgtgatatacgcccacaggcgcagatgcgaaagcgcaaggcagtacaggctgccgctaaacagcaccgtgcccagcgccagaaaaacgctgctccagtaaaaccagatgctgatacggcgctgcatcgccaccgccaggccaaagatcgccagcgtatggaacgcctgatattgcaggccggtctgaatccagcccatttcaaccacgcccagggttttactcaaaacatgcgccccgaacgcgcccagagcaacgtaaataaaaccgctgatagcggcgacaatcagcataaaacggctggtcatggtcataccctaagttaattattgttcgtaacgaaaacggaatttttcttgctccgtcgccgccttcgccaaaatccactgacggaaggcggctattttacccagttctgcctggctgtcatgacaaaccagataaaaagcattcttactcaccagaacatcgttaaatggacacaccagtcgcccggcttcaatttccgactgcgccataacattattcgccagcgcgatcccctgtccgtgaatagcggcctgtagcaccatcgcgctgtggctaaatatcggcccttgctgaacgttaatatggttgagccctaactgacgagtataggcctgccagtcacgccgggaggcgtcgtgcaatagcgtgtgtttcgccagatcttccggcgtttttaacggtttttcgcctgtgagtaataaaggagaacagacgggcagtaaatattctgcgtataatttttcgacgcgcaagcccggccagtttccccggccataaaaaatcgcgacatcgacatcgtctgccagtttatcttcctgacggtcaacggcttgtatccgaacgtcaattcccggataagctgagttaaagctggagagcctgggcaccagccactggatggcaaaactgggcggtaaactcaccgtcagcgcccctttggcactgcgcgcctggagcttacgcgttgcttccgtgagctgggaaaatatctctttaatgtcgagaaaatagctttggccttcttccgtcagcagcagcgaacgattgcggcggcggaacagttttagccccaaaaaatcctcaagtgacttaatttggtggcttactgcggcctgcgtcacaaaaagttcttccgctgctcgcgtaaagctcaaatgacgcgcggcagcatcaaaaacgcgtaacgcatttaaaggaggtaatcgttttgacatggcctctggacttaatgtcgaatgaatttaacaaataggtaacaacatgtaacctattagtttttttaatctgagacattataaattgtccgttgaggttctaccagcaaatacctatagtggcggcacttcctgagccggaacgaaaagttttatcggaatgcgtgttctgatgggcttttggcttacggttgtgatgttgtgttgttgtgtttgcaattggtctgcgattcagaccacggtagcgagactaccctttttcacttcctgtacatttaccctgtctgtccatagtgattaatgtagcaccgccatattgcggtgcttttttttgtataacaaacggttagttttccagagccaccatctctttcacgtcagtacgattgatctgctgtttgttgccattagcgtctttatacgaaatcataccggtatcgttatcggtctggggtttaccgtcggtcacaatgctacgtccatcattggtgtgcataacgtaattaggaccggaacaggcgctcagggcaaaagtcagcatacatgcagagataattgcggcagtctttttcatcttcttctccttaaagctgtttgtgctatttaaagcggactccgtaacaggcttaaacattcgcctaacattattcagcataacctcctttacataattcgccaggatatacagacgattccgatggttaggacaaaccttgtatcagccgcgcttttacgccacgatcggtaaactgaaccgaggaatatcatgaacgcttttaatcccacgcagtttcgcgcgcagtttcccgcgctagccgatgcgggtgtttatctcgatagcgccgccacggcattaaagccacaggcagtcattgacgccacgcaccagttttattgtttgagcgccggtaacgttcatcgtagccagtttgcgcaggcgcagcgcctgacggcgcaatatgaagcggccagagcaaaagcagcgcggctgttaaacgcgcccgatgaaaaaagtatcgtctggacacgcggcaccaccgaagcgatcaacatggtggcgcagtgttacgcccgtcctcgtctgcgccccggcgatgaaattatcgttagcgtcgccgagcatcacgccaaccttgtgccctggctgatggtggcgcaacaaaccggcgcgcaggtcataaaactgccgcttaatgaccggcgtcttcctgatgttgagcgtctgccggaactgatcacgtcgcgcagccggattctggcgctggggcaaatgtcgaacgtaacgggcggctgcccggatctcgcaagcgctatcagcgccgctcacgcagcgggaatggtcgtgatggtagatggcgcgcaaggcgcggtacacttcccggcggatgttcagcagcttgatatcgatttttatgctttttccgctcacaaactgtatggcccgaccggtatcggcgtgctgtacggtaagccggagcttcttgaggcgatgtcgccctggctcggcggcggcaagatgatccgtgacgttagctttgaaggcttcaccactcaaagcgctccctggaaactggaagcggggacgccgaacgtcgccggggtcatcggcctgagcgctgcgctggaatggctgtccgatatcgatattgaacaggccgaaaactggagccgcgggctggcgacgctggcggaagacgcactggcgaaacgcccgggctttcgttcgttccgctgccaggactccagcctgctggcctttgattttgtcggcgtgcaccacggcgatatggtgacgctgctggcggaatacggtattgcgctccgggccgggcaacattgcgcccagccattgctggcggaacttggcgtcacagggactctgcgcgcctcttttgcgccgtataatacccaacatgatgtggatgcgttggttaacgccgttgaccgcgcgctggaactgctggtggattaatgacaaaccctctttataccggacacccgttcggcacaacggtaacggaagagacgttacgcgctatctttctcccgctgacccagtgggaggataaatatcgtcagttgattctgttaggaaaacagctccccgctctgccggatgaatgcaaagcgcaggcgaaagagatagccggctgcgagaaccgcgtctggctgggctttacccgatcagataacggaacgatgcactttttcggcgacagtgaggggcggattgtccgcggcctgctggcggtattgctcaccgcggtggaaggaaaaaacgccgccgagttgcaggctcgttcaccgctggcgctgtttgatgagctgggtttacgcgcccagcttagcgcctcacgtagtcaggggctgaacgcgctgagcgaagcgattgttgccgcaacgcataagggttgaaatagcgtaaatattctgtcgcctgacagcgccgcccgcagcggtcaggcgatgcagataaaataatccagtcactttattagtttcggcgtcagatttccctgataagcattcttttgatttttatcagctatcacaatgaaattacaatgttagaatccatgttaaaacggcgtgaagattttagagtaaataaagccactcgatgtagcgtagcaggagaactggaaaattcatacgcatcgggtgaagttataacaggatatggataagtggaaaaatatctgcgtagcggtaccatgtttgtggtactggcatttatattatgggggttaacacctttatattatcaatatttatcaggggggaatctcgcacaaatattgatataccgggtgttctggtcaattccattattactggcagtaagattgttatttcggcagcgaacgcgatttcatgatgcctggaaagataaaaaatcttttttcttctgcatgatcgccggacttttgatgattgtctcatggtcatcttttatttatgcgctaacccatcatctggtgcttgatgccagcctcggctattttatcaacccgctatttgttattgcgctgggatgcatttttcttaaagaaaaactgtcgttgtttcaggccatcgccgttttttccggtgtctgcggcctgacttttcaaattatcatgctacggcatttcccggcgctggcgctaaccatgggattatcatttgcgctatatggcctggcgcgaaagtttatacattatgatgtgatgacatcgataacgattgaaacattatgggcattgcctgtctcactattaatttttctctttagcgatactggaccaattatatccgctaatactcctttctttttgtatgtcatgacggcgccagtgacgatcattccactggtattatttgccatcgcgttaaatcacacctcgttgattgtcaccggactggcgcaatatatagagccgtctttacagttcttacttgccattatgatatttggcgagcacattaattacgcggaactgctctgcttttgtgcagtatggttcgggttgtttctatgcatatctgaaaatttatattcccattatctccgcgcccgtctgaaaccggtgttcggcagggtacagcgcttctttcgctaacgaagggcgcagggccggatacgcgtctgcgtgacactccgccccgtccttttattcttgtcgcgccgctttagccatgatcttcttcagcgcatgggaaacggcgacaaaaccgaacgttgccgtcaccatcgtcgccgcgccgaagccagaggcgcaatccatccgttttggcccttctgcggtagctttcatcgcgcatacggaaccgtccgcctgtgggtaaaccagcgcttcggtggaaaaaacgcagtccacgcccagcttacctttactgttcttcactacgccaaaattatgtttcaatctctcgcgcagttttgccgccagcggatcctggatggttttcgccaaatcagcgacctggatttgcgtcggatcgatctgcccgcccgcgccgccagtggtcactaaaggaaccttatatcggcgacagtacgcaatcagcgcggcttttggacgaacgctgtcaatagcgtcaatgacataggtaaaacccgcgttcatataacccgccacattatccggcgtgatgaaatcatcgataaccgttacccggcactccgggttaatttgccgaatccgttcggccatcacttccgctttcgccaacccgacgttatcacgcaacgcatggatctgacggttcgtattggtcacgcagacatcgtccatatcaatcagcgtaatcgcgccgatgcccgtacgcgccagcgcctctgccgcccatgatcccaccccgccgattcctacgacgcagatatgcgcctcagcaaaccgctgcagcgctttttcaccgtacagacgcgcggtgccgccaaagcgttggcgccaggcatcacttatcaccactgacatatgacctcagaataaaaaaaggtgaggttattcctcacccctgctcactattttcaggcccgatagcgatcgcgttatcgggcaatccggttgtcgcagaataccacaatcagccgctaaacacgttaccggcgcccggcgcgctttttaacacccagacgcgaccatagtgattataccatccggcacgatgcccggcatccgggccaattccctggtaaatatcaaagtgctggcctttaatcgctccgccgacatccagtgcgaccatcaaacgtagctcatactgaccgctaaatttaccgttgttatccagcaacggtacttccgccaacaaggtcgtgccaggcggaatgatgctgcggtcggaggcgacggatgctcgcccaatcagcggtacagcgctggcgcctttgaccggcgcaaaagattgcggcttaaagaagacgaacgacgggttctgctccagtaattcacgcacttccgcttcgctgtgcttctctccccattcgcgtatagcctgcatcgacatatcttcttttttcacttcaccgcgatcgataagcactttaccaatactgcgataaggccagccgtttttaccggcataactaaagaagttcagcggactaccatcaccaaaatcaatataaccgctgccctggacatccataataaagttatccatcagcgaattactccaggccaggatgtacttatcgctcagcgcgcctgcgtagatctgagcgcgggacggtaagcgtccgcgttttggcggcatactatagataggatactggaacgcgccctggcgcgtatggcgagcctgaacgacgggcgtatagtagcccgtgaactggacgttaccgtagttgtcggtgccttccatctgccaggcatcgataccaaactgacgcatagtgcgcgtatcgcctccggaacgtaaccagttctggacagcgttatagacgttgctttgattggtgtataaacgcggcgacgcggaacggatctggttgacctgctcggcaaagtctccagcattaatcggcgcgcccactgcgtccggctggtttaccagggagaagggctgggtaaatttcccgtccttatattgctgaccgcgatcggtcggttttgatgaacaggcagccagcattgccagcattacgcctgtcgccacatattttgcccaacgtcctttcatggtgtctcgtcttctgcgtaatcgaaagtgcccggtgaagataacaaaccgtccgaagtaatgaaatgcgatcgcgatctcattatgtaaattcgtttaaaaatcgcgctatctgcggtgtatttgcgcaattcatgagaaattagcgatttatatgaaaaaagggttgcaacaaaagctcagcggagtatagtgcgcatccacggacgcggggtggagcagcctggtagctcgtcgggctcataacccgaaggtcgtcggttcaaatccggcccccgcaaccaattacaatgagaatgcaagtttagacggacgcggggtggagcagcctggtagctcgtcgggctcataacccgaaggtcgtcggttcaaatccggcccccgcaaccaacttaatgaacacccttacgggtgtttttttgtatctgtcgtctggtccgcaacgacagtgcgggcagcatcctacttacccgcgcaataaactcgccgtcatctcaggttaacttcttctcgccagcgtcgccccatcggcaaaatacgctttaatgcccgccagaatcgactctgcgacctgttgctggaacgtcgcggtcttgagcttgcgttcttcttcaatgttactgataaacgccgtctcgaccagaatagacggaatatcgggcgcctttaacaccgcaaaccccgcctgctcgaccttgtttttatgcaggtcattaattttaccaagctgcttcaacaccgctttaccgaatttcaaactatcggcaatggtcagcgattgcaccatatcgaacatcgtatggtcgacataacggtcaccgcttttgctcacgccgccaattaagtccgaggcgttctgcgtttgcgccagatatttcgccgcagtactggtggcgcctttggtcgatagtgcgaatacggatgaaccgctaggctgccggctggtgaaggcatccgcatgaatagagacaaacaggtcggcgcgctgtttctgcgctttcgccacccggacttttaacggaatgaagatgtcttcattgcgcgtcatatagaccttcatgttgccttctttttcgatcaacgcgcgcaggcggcgggctatctggagcaccacgtctttttcacgcgttttgtatttgcctatcgcgccggggtcttcgccgccgtgtcccggatcaagcataataacaatggggcggtcgcgccccgctttaccgggctgcggcccgctttgcgaaggcggcacctgcttatccagatcgcctttattgtagtcttccagcagcgccagcagcggatcctgcatatcctgcgcattggcaggataaagatccatcaccagacgttctttaaagcctgccacaggcgccagcgcaaatagctgcggcttcacgttttgttttagctcaaagaccatacgcacagtcttaggatcaaactgccctacccttgcggatttgatatacggatcgtcgctgcgaatctgcgcgccaatgcctttaagcaccgagttcagattcacatcctcaatatctactaccacgcggtccgggttacttaaggcaaattgtttatatttcagcagacgattcgactctaccgtgacgcgggtatagctggacgcaggccagatacgcaccgcaacgacctggcttacggcagccagcccgacctggctcacgcttaatagccacatggcgcccgcgccttgtagtaaacggcgacggctgattgctgaattggctcccgacatgcttctcccgagcaaaaactaaatagagatcatacaaagttcatccaaattgaccggaaactttagcgaatgacgcataatctgtcatctataaaagggtaaacattctttttatattcacggcattactaagaaaagcgatcggaccgcataaaatttacgcttgcacagagggcaaaaacagaataaaaatacactaatttcgaataataattcactagtggggcgcgcaatgataaaggaacgtaaaaccgaactggtagaagggtttcgccattcagttccctatatcaacacccatcgcggaaaaacctttgtcattatgctcggcggcgaagccattgagcatgacaatttttccagcatcgttagcgatatcgggctactgcatagcctcggtattcgccttgtcgtggtgtatggcgcgcgaccgcaaatcgacgccaatctggccgcgcatcatcatgaaccgatttaccacaaaaacacgcgggtgacggacgccaaagcactggagctggtgaaacaggccgccggtttactccagcttgatattaccgcccgtctgtcgatgagtctgaacaatacgccgttgcagggcgcgcacattaatgtcgtcagtggcaatttcaccattgcgcagccgctgggcgttgatgatggcgtggactactgtcatagcggccgtatccggcgcattgatgaagatgcgatcaaccgccagttggataacggcgcgatcgttctgatggggccggtcgccgtctcagtgaccggcgaaagttttaatctgacctcagaagagattgccactcaactcgccgttaaactgaaagcggaaaaaatgatcggtttctgttcttctcagggcgttaccaatagcgagggcggcatcatttctgaactcttcccgaatgaagcacaggcgcgggtggaagagttggaagcgcagggcgattacaactccggaaccgtacgttttttgcgcggcgcggtaaaagcctgtcgtagcggcgttcgtcgttgccatctgatcagctatcaggaagatggctcgctattacaggaattgttctcgcgtgatggtatcggtacgcagatcgtcatggagagcgccgagcagatccgccgcgccaccatcaacgatattggcggtattctggagcttatccgcccactggaacagcagggcattctggtacgccgttcccgtgaacaactggagatggagatcgataaatttaccattattcagcgcgataatatgactatcgcctgcgcggcgctgtatccttttgtggaagagaaaataggcgaaatggcctgcgtagcggtacatccggattaccgcagctcatcgcgtggagaagtgcttctggagcgggttgccgcccaggcgcggcaaatggggctgcgtaaattgtttgtgctgacgacgcgcagtattcactggttccaggagcgcggttttacgcctgtcgatatagagttactgcctgagagcaagaaaaaaatgtataactatcagcgacgttcaaaggtgctgatggcagatttaggataacaaggggggcctgatggcgctgcgcttatcaggcctacgctcgaaagcatcatttggaggccggataagacgctacgcgtcgccatccggcgagaactcgtcttatccggtacgactgacttcatcaaataaggtggctagcccgctgcgccgctccgtacgcgtcacaatcgcgcctgccaggatccgttcatcggcatacagcgataaccgccgccgcgctcgcgtaacagcggtatacaccagctcccgcgtcacgaccggcgaacgctggctgggtaaaatcagcgcggcgtgatcaaattcagacccctgtgatttatgtaccgtcatcgcccaggttgtatcatgttccggcagacggctgggctgaacggacttgatcgtgccgtccggcatcacaaaccagacgcgtaacccctgcccgcgatcgagcgcaataccaatatcgccgttaaatagccccaacgcgctatcgttgcgcgcaatcattaccggacgcccttcgtaccagcgagaatgcgggtgccgctgaatttttcgttgctgcaccatcgcctgctcaatgcggtcattcaatcccctcacgccaaatgggccttcgcgcagcgcacaaagcagttgatactcattgaaagcctgaaggattgcctccggcgtcgctttttcatgcagcaaccgcaggtagcgaccatagcccgccagcgcttcatccagcatcccggcataatcgtcgctgctttgcaatgtacgcttctctatatcgctaaacccctgctgaaaaacagcctggattgccgacctgtcgccgcagttaattgccgccgccagcttgccgatgccagaatcgctgccgaaacgatagctcttttgcaacaaacagaggctatcgcgtaaagatgcggcttgcgttccggcccccgccggaatggcgctaccagtgagtcgacttagctgtcgggcgcgttccgccgtaaaccctgcgttgacataggcgcaaatatcgcccaacacagcgcccgcctcaacggatgccaactgatcgcgatcgccaagaaaaatgacccgcccgtgcggcggcagagagtcaatcaaacgtgacatcatcggcaaatcaatcattgatgcttcatcgaccaccagcacgtccagatgtagcgggttgcccgcatgatggcgtaatcgttggctgccgggctgtgcgcctagcagtcggtgcagcgtactggcgtcctccggtatacgctttttctgcgcatcggtaagaggaagctgacgcaacgccgcgccgagcgactccgtcaggcgtgcggccgctttcccggtcggcgctgccagccggatacggcaacgttcgccatccgccatttgaattaatgccgccagcagcttcgcgacggtggtggttttaccggtgccgggaccgcctgaaatcacggagatacggcgagttagcgctacggcggcggccaccttttgccagttcacctcgtctgtcggagggaatagcgcgtccagaatacgggataactgatcttcatctacggcgatggcctggttaacctcgttaaaaaagcgcgcaaccgtacgttcgttgcaccacatgcgattcaggtagagacgctcgccgcacagaattaacggcgcggggctatcgccgcagctaaccgccgcagacgccagtaaccgctttttccagtcgattggcgtagccgtttcgcttatacaggcgaccagtaagggatgcgcctcctccgttaacgttaaacgcgacaacggcagacacacgtgaccttcacctgcgtcatgactaagcagcgctgccgccagcgtcacggcgggatcgtcgttaccggcgacggttaaagcaaactgggcatcaatgggccgtaagagtttttgttcaacggcctccagcaaccgctcctggattgtcattgcgcctcctcactcatttcacctgcaaacatatcatccagttggttaattaacgccgccgcaggacgagtggtaaaaataccctgctgcggacgttcgccatccaccccgcgtaaaaagagatagatgacgccgccgaaatggcgttcatagtcgtaattcgtcattcgatgacgaaggtaacggtgcaatgccagcgtataaagctggtactgcaaatcatagcgatgcgcctgcatcgccgcagccatcgccgtctgggtataagcggcgctatcctcgcccagccagttagatttatagtcgagcaggtaatagcgcccttcataacggaacaccaggtcgataaagccctttaacatgccgcgaacctgcatgaaatccagcgcagggcaacctgctgaaagcgggtcgtatcgacgaatcaacgcatccagctctccggcggtaagcggctgggcaatcggcagataaaactccatttcgacctgtttttcacgctcggtcagcacgctcagactaacgcccgtctcgttaaggggaacgtgtaacacggtgtccagccagcgggtaagtacgggctcccatcgcgtttcaaaaccactcagctccagtttttcctgtacccattgggggtttatcggttgagtaaaatcaagctcttcaaacaggctgtgcaaaaatgttcccggcgatgccccgcgaggaaagtgatgcggcgtcattgccggcgcttccgccgcttcgccaacgcctgcggcgtcaatgtcgagacgaggaataagatcttgcgccacgctatgtccccgctgctgcaaaccggaataactggtgacgcgccagctatcataaagcaggcgttgcagcgctctggcgctgagttccgcatgcgatgcagcggcaatttgccagcgatcgttatccgtgttgcctggcgttcgacacacgatatcctcgtcgcatagcgcctcaatacaggcgcgaaggcctgcggcatccatcggttcgcctttttgcaggagtcgcccaagcgcgctttggtgcacatccgtctcgcctttcttatcgctgcgacgccgtaccagcggcgcgacgccgaggctgcaatgccacactgcacgggtcagcgcgacataaagtaggcgcaggtcttccgccaggcgttcggcttccgccagtgctatgctctcttcggcgtgactaaggtccagcaccgcctcgtaggagtgcctgtcgtgataaaaagcctggtcctgcacgcggaaatgggtgataaaaggtaaccagaccagcgggtattccagacctttcgatttatgaatggtgacgatttgcaccagatgcttatcgctttccagacgtagttgctggctggaagcattgctatcgggttcaaggatatgttgcgccagccaacgcaccagcgcatgttcgctttccagctgcgaaccggcttcctgtaacagttcgctaatatgcagaatatccgtcagccgacgttcacctcccgccgtcgccagcaggttttcagcaatattgcgcgccgacattagcgcgcgcagcataggcatcacgccgcgtttatgccaaatctgtcggtagccatcaaactcttcgacaaccgcatcccacgcattttcatcattgttaagcgtttcgatatccagcgcggtaaggcccatcattgatgtcgccagagcgctacgcagcgtattctcacgttcgggcgccatcaccgcctgcaacacccacagcatttcctgcgcttcgagcgtttcgaatacgctgtcgcggtttgaaagatagacggaagggatcgccagtaaggtcagcgcatcccgtatcagcgcggcttcccgcctgctgcgcaccaacacgctgatatccgaggcgcgaacgggccgcgacgaatcgccgttcgtcagcagcgcgtcgcccgtttgcccggcgcgcagccagtcgcgaatttgcgtggcgcacacctgcgccatataactttgataatcgcccgaaccgcagctttccccctccattagccacagggtcatcgccggttgaggcgcgtcattcactttaaattgcagcgactggtttctgggcgcaaactttaccggactgaagggaatatcgcggaacataaaggcgtcattcatctgactgaacagcttgttaacgctattcaccatccccggcgcggagcgccagttagtgtcaagggtatagtgcgcgctcacttcgctgcgagccttcatgtaggtaaagatatccgcgccacgaaacgcataaatcgcctgtttaggatcgccaatcagcaatagcgccgtatcgggttgatgtcgccagatacggcgaaaaatacggtactgttgtgggtcggtatcctgaaattcatcgatcatcgccaccggaaaacgggtacgaatcgccgcagccagcgcctcgccgctttcactacgcagcgcggtatctaaacggctgagcatatcgtcaaaccccagctcgccgcgccggcgtttttcctgagccaccgtttcacggatctctgatagcgctcgggtaagaaccagatctttaatcgatagcggttcgcccaacaggttatcaatggcgacaaacaatgggtgctggggcgtcacgccgccagctttggtgcgctcagctaaaaaacgctgtgaaaattttcccaacgcctcgggtaattgatagtttttcgtctcttcttgcgcccacgcggtgatcttttcgatccatttcgcctgattgccgcggttgaattttctgcgatcgatgccggatgattcgatcagcgcgtccagctcgctaaccgcctcacaccactgctgcttcacctggttgatgcgcgccaggatctgttcatggcgcgatgccagcgtctcctcctgcgatggcggcgctttaatgaccggcgcttcgccctgcagataacgatcgatatcctttaagagcgccttcggtcccttccacacgtcaaacaccacctgcgcgatgtcgcgcggcagcggatagcaatgacgccgccagaaatcggcgcaggcctgataacgcaacaaagattcgtcttcaataagctgttgctcaaacaacataccggattcgaaagcgttcaggctgagcatacgctggcaaaaaccgtggatggtaaagaccgcggcctcgtccatttgtcgttccgccagtaataaccactgcgcggcctgctttttgtcgctaatttcttccagcaagcgggcataaagcggattatccgtgctttcccgcagacaggcgatgcgcaactcatggatattactgcggattcgcccacgcagctcttcagtggcggcctccgtaaaggttaccaccagcagttcttcaacggtcaacggacggggaaatgcggcgctgccgcctaaaccgagcagtagccgcagatacagcgccgcgatagtaaacgttttgcctgtgcccgctgatgcttcaatcaaacgctcgcctgtcaggggcaagcgcagaggatcaagagtctcggcgacatcattcattcttttcgctcattagaggtaacgtttgctgcaaagcgctgacgttatcccacactttccagcctgtcggatgcacgtattctgcttttccattctggctaccggcaatctgtgacaatattgccataccttgtggttccaccaccgcctggtggaagaaatcggcaagcttttgtggcgtcagcaattttatctgagcgatgattttatcacgcgagtcaaagcgcatattaccccgatcgaaatccttgcttaaacgggatgcttcttcgcccaacgtttgcggcgcctggcgcatttgcgtaatgatcgcctgctgaatttgggcgaactcttccggcttcatcgccctcagcttcgcctcggcgtcagggaaaaatgcctgatagcgttgccacaggtaagagggctgtttatcgttgctctgtagcaggaaccccattccccactgacggccaacgctcatcggaaaggcgaaaacggcgtatcccagttgctcttcggttcgtagctgattgtaaaaccacggttgaacaatctgacctaacatcgcgctgtaggcagcgctgacgtactcgtcgtagccgaccggaacaaagaccgcggctaacgcggagtcggtgctactgcccgctttttcaaatattacggactgctttttctcaaccaccacgtctttgttgcgacaccacgccgatccgttcgccgcgagctgtttttgaacatcttgcgccagagaggtcgcctgggcttcgctcatattccctataaccagaaattccggacgagcgcccgtttttaacgcattacgataggccattacctctttcaacgtaatggacggcagcaaagcgcgacgttcatcacgggaaaaataaggcacctgcgaaatcatctgcaccggcataatcgcctgctcgtaggcttttcccttctccgcagaatccatcatctgcgtataccaggatttcgcctgcgccagctgttcctccgtggcgtcgtagctaaaatatccttccagcaacgccaggaaaagctgcggcaaacgctgggtataaccgttcgcagtgaccatcagaccattgttggcgttagtagaaaagctaatgccgcccactgccgcctggttgctgagctgatcgagcgccattcccgccagataatcattaagggcgaacagtacctgattgcgggcgctgtccatcgcctgcgggttacgcaataccacgctcacgtcagcttttggctcgctggcgaaataacgactcggcgcataaaccacgcgcaaatccgctttatcgacaatcagttctggccgcacgtagtttttgtcattcttaacaagcgtaaaatcatcaggaatataggggtttaactccggcagcgacaacgcaatgccctgtgctttttgctgccagtttttaaacgtctgttcgctaatcttatcgacctgataaggcgcatccacaaaatacgccgtcttattatggggttcctggggactgatgtaccagatgcgcgcattctgcggcgtcatcatcgccaggcgatttttgatagcggcaggatcgtaacgatcggcgatattcgccgcatccagcgtatgcgctaccgggacgcggatcatagtgtccgccagccattcgacatagtccatatcgcgggtaatcgacggatagcggaagtcgagatccagcacatgcgccagctcgtcaaagtaacgtttatctatccctttttcacgtaacatattgagatagctgaaaatagccgcgacgacttcatcacgattggctaaacctttatcggtcagcgttgccgaaatggcaaatacgccgctgttaccattaacaatcggatcggaatccgcgctaataccttcgaccagtccttgtttttgcagccagtcagagagcgtccctgggctacgattgccaattagataagagaccagttcatcggtcttgctgcggaactgcgcgctattgttatcaatacgaaactccacgcgcagcactttacgcggtagtgccggcacgtaatgaataatgatgcccttctgcgcctcggtgatgacaggtacggtaatttccggttttttaatctgtttattcggcacgcgaccataggttgcggcggcaatactcgccagttccggcaagggtttattactgtaaatcaccgccttcatcagattagatgaatagtatttttcatgaaaagcgatcaacgcctgttgcaccggatttcccggcttatcgcttagcgtttccagattgccgccagaaaagtgcgagcctggatgcgccgggttaatggtttcggcgcttacctgcgccatacgcataccgtcgcgggtgcgcgccatcgtcagctcggcattcaccgcgtttcgttcgcgttcggcatactttttattgagcaatggcgcggcaatggcgtcggccagtcgatctacggcacctggaagcgcgtcgttttcaacctccaggtagaaggctgttcgataaggcgcggtgctggcgttgtggctaccgccatgtcttttaaggtattcggcaaggctatccgcctgcggatatttttttgaccccatcaggcacatatgctcaagataatgagcaagcccctgatgagcctcaggatcttcaagcgatccaacgggcaccactaacgctgaaagcgactttacagcctgcggatcggatacgagcaacaccaccatgtcattatcaagacgtatcgcctgatactgccgggtatctttatcgcttttacggatagtttcttgcagcggttgccaaccgatatccgcctgaactgcaggcccccagagggcgaccaataacaataacgctttgaaccaggtgctgcggggcattcacggacctcatcattaactttcattcccactcatctgtatggtcacgtaaaccatcgacctgagcagaacgggatattattgtgctgaaccaggcagcatttttttatcagtaatcagtccgtgacgaagagcgcatcatagtcgaagccttttaatggcgcgattttcatacaatcaacgagactgattaaaacgaaacagcggtaacaggtaatgccgtgactgcgcaatgatagcctgcaacgtttcagattccagctgacgccaaagacgttgataccagatatcttcgccttcgccgctcaccatcatgttgccttcataagcctgtagaaactttgtcctggccttctgtaaagtatcatcgtcgtctaacatgacatcattttcagcgtcataacaggcttttatccatgcgccgccgctttccggcagtaccaatagcggagaagacatgccttcccggtagccttcaatcagttgcgccaggtaagccattgcctgcgttttatcaagaggcggaaatcgccactctccctctttacgcaaaaacaggcgactttcgccactaccgccgctggcacaatagacaaggtgttccagccaaagttgcacaccttgcgccacgctgattaaagcgggacgccagcgcaataatccatcctcctgtacctgcggcagccagccggttagctgaacgccattgcaaagcagatccacttccaggctttggctcggcttacggcaggcgatgacccggcttgccagttgctgcatctcctgacattgcgcatcccagaatatttcgccaaacgcgccgtaaggcaactctcccgcagcccggaaacggcggaacaagcgttcggcgtcgtcctcttcaaccagcgtattgagcaactgttggttaagttgatatcgcgtcaatccctctaattcaaacggttccgcatcaggaatctcactctcttccgagcggaaattaacctgaagccgcatctgaaaaaatgcgcgtaccggatgggcccaaaaacgctgcagactttccagagtcaatgtttccggcatcgtaaaaggaagcggctgcacaaagtcagaatgcgcttttcccgactgactcgccgcgggcaaccactctctggcataactttgctgttcgccgggttggtaattttgcgcatcaaaaggcatacgggtatgcagacgcgtaatatgcgctttgactcgtgcttcgctctcatcacaggtcagcgtttcgtcgcccggcaaatagtggctttgtccgatgtaatccaccaattcttgcaccagtacagagggaaagcgttcgctattatcctggatggagcgaccgatgtagctgatatacagcgtctgctgcgccgagattaacgcttccagaaacaggtagcggtcatcgtcgcgacggctacgatccccgcgcatgggtttttggctcatcaggtcaaagcccaacggcgcaagctggcgcgggtatacgccgtcgttcattcccagcaggcaaacgactctaaacggaatggaacgcatcggcatcagcgtacaaatattgatggggcccgccaggaagcgctggctaatacgttcctgatccagacgctgcgccagttcatcccgcagtagcgaaatcggtaccgcgtcgccatattccgccgcgacgccttcggcgataatggcctgccactgctgttcaatcaatgtcattgccgcttccgtgtccgcatcgggcaggaagaaatcattgaacatatcgcgacaaacgggcagccactcttccagcggtcgctcctgcgccagaccgcgccgccagatattaagctgcatcagcagcgaagccagatgcccgaccagctcagcaatcagaccgctggattcgtcataaggcagaaccgactgccactcgccctgggcgctttccatcgcataccccagcagcatacgcgtcaggccaaattgccacgtatgctgccccgtggcaggaagttccagctcgcgtacgttgtcatcgtcaattccccagcgaatgcctgactcattgacccacaagcgcaaataacgcagcccttcttcgttgatcgtaaagcgggcagccaataccggtacgtctaacaacgccagaacatcctcggagacgaagcggctgtccggtaacgaaagcaggctgataaatgcctgtaacaccggatgtgactgacgcgcccgccgatcggaaatggcataaggcagatagcgctccgttggcgcgctaccaaataccgcctggataaacgggctatagctgtcaatatcagccaccataacgataatgtcgcgcggcgttagcgtcggatcggcttccagcatcgccagcaggcgatcgtgcagtatttccacctcgcgctgcgggctgtgacaaacgtgaaaagagaggctgttatcctcgggatcgagcagacgcttattgtcgctgcgcgaatactcctcaagatttacgcccgccaccgcatggctttccagttcaagaatatccgcctgaatccgatgcaaaagattatctggcgtaatatcaacaaacgcatccagttcctggctgttttccagttcagatagcaggtagatataatcccgccccagttttccccatgaggccagtagcggattaccgatatcctgttcaccgtcgctgttaaataaggcttccggattctggttttcacggaacaacggtaaatgacggtcttcaaaactgtgacgacgctggcgagccatgagttttgccagccaggctgggtcttttatatccccccagtaataccgacacggattagtaaaaaggagatggatttcaatatgtttacccagcgcctgcaatgctctgagatacactggcggtaacgcggaaatgccgcaaataaaaacgcgggacggcaaccctggcgggcaggcggtcgcgctttccagcgtttgaataaagcgttggtagagattggcgcgatgccagcgcggctgccccagcgcggcggtatattccaccaatgctttccacaacggcgcctgccagttttgcgcctctcccagaccttccacggtttttcccgcttcccactgcgtaagccagtcaggccgataaaccagatactgatcgaacaggtcggcggcgcgcgcggaaagctgaaagagtttgcgtttatcggtgtcgtcggtcagataatggcgcagcagtacaaactcatccttatccagcaactgcggcagcaaggtcatcagtttccagctcatgctttgtttgctgaaagcgctttctttgggaatatccggcaacacgcggacaaacatctcccagataaaactcgccggtaacggaaaagcgatattcgccgcaataccaaacttttgtgaaagggtcatctgcagccactgcgccatacccgtgctttgtaccagaatcatttctggttcaaagggatcatccagccgctcgcgttcgacgatgaactccatcaacgcttccagcacatccagacgattggagtggtagacccttaacataattactcctgacgattaacgatttggacaatgcaagcgcgtcatctgcccctgcctgccagagggtgaaaccatcgtgacgctgatgctgacacatcccgattgcgttgtctgcatccggttggccttccagtcgtcagcaggcgaaaatggatacagcgccgtttgctgccacgcctgccgccagatctggagatactggtgtcgtaatgcaaaactgtgcattaatacccgctgatagcctgacagcgcggtgacgatcattaccattagaaccatcgccactaaaacttccgggaggctaaacccgcgttgtaaattcaggggatgcgacataacgccacctcttttaacggacaaaaatcgctccagccgtggggagaaaagacaatgcttccctgaatgacgttgcccaaacgccataacgtcatgccgtcatcttgcgccgccatcaccacctcatcccccgataatctccgcaaacagactctcgctcctgaagaggaatagcgccgacattccatttcggttacgcctgaccatagctgcccccgtccccattccagcgccgactgcacaagcgcctggcgttgtatcgccaggctctgcgtcgtcacgcgggcggcatagctggcctgctgctgatttacgccttgcagtagcagactgcccagaatcagtattaaaagcgccagtattagcgaagaagcgccacgttcccgattcacagattaaatcccgttacgctgtattgcgcgtcaataaccgtctgaggctcggctttgctggcgccgcgcagatgcagcatgagcactggcgagaatcccgttatatcccggcgctcaacggtaaacgccgtgatgagtaccgtattgggatcggtcattttttcccatcccttaccctggcaagatgttgctccgcgtaatgtctccagaacgttatccttcatacggaacccggtctggtcggcctctttcgccggtatggtatcccagaccccgttattattcccgtcccactgaacgatgacgcattgcccctgttcggcaagatgtaacccttcgccaatgcagtggccatgacagtaacccgcacgttgaagatgcttcgctacggtataggttcgctgccagatttcatcttccagcgataactgtcgcgtgttgtgccagatctcgcgttgtagcgccggtaaaaatcgtgcggacccaagcagtaaaatggaaccgatcgccatcgccagcacaacctccagtagcgagaacccccgcgtggttattgacacgtggcggcctcgttacgctcgcatagcctgattcgcccccaggaggagacgaccagacgccactctccggcagcgtttttcagtacgatgtgccctgcccatgccgtattgcgcaagccaaagaaggctaacgacggcgtgatatcggcaaggacgacatcacgccagtcgggcgtaaacacaaagggggaagatggcgtacacgatgtttgcgtagcaacagagctgacaaagcaccatgaaccgccttcgctgaccacgcgaagaatgtgatcgcggttatgccagtgagcgtccccacgaagttgcagcaggtaatcccgcacctgacatgcggtttgccacaggcgctgttgctgctgccagcgttgccagccataaagtcctgtggcgctgagaatgataatgagcgacatcgcgaccaccgtttcaatgagcgtatagccctgttgttttttcatgtcggcagtatggcgggcggaagaaaaataacgagcgccaaatacagattgttcggcgcgttacggaaaaaagttcatgtcttgcagcgcgttgcaaaatttcaggaatgcgcgccgaagattgagacgaagggtaaaaaaaaccgacgcgcgatgacgtcggttatggcaggatcgtcagcgcttagatagcgaccggcgctttaataccggggtgcggatcatagccttcaatttcgaaatcatcgaaccggtagtcaaaaagcgaatcgggtttacgcttaatgaccaatttcggcagcgcgcgcggttcacggcttaattgcaggtgcgtctgctccatatggttgctgtacaggtgcgtgtcgccgccggtccagacaaaatcgccgacgtccaggtcgcactgttgcgccatcatatgcaccagtaacgcgtagctggcaatgttgaacggcagaccgaggaacacatcgcaggagcgctgataaagctgacaggagagttttccatctgcgacataaaactggaaaaaggcgtgacacggcgccagcgccatcttatccagctcgccgacgttccacgcagaaacgataatacgacgagagtccgggtcgtttttaagctggcttaagaccgtggcgatctgatcgatatggcggccatccggtgttggccatgcacgccactgcttaccataaaccgggcctaaatcgccgttctcatcggcccattcgtcccagatggtgacattattttcgtgcaggtaagcgatgttggtatcgccctgcaaaaaccatagcagttcgtgaataattgaacgtaaatggcagcgtttcgtcgtcaccagaggaaagccttcctgcaggttaaaacgcatctgatggccaaaaatggaaagcgtgccggtgccggtacggtcgtttttctgtgtgccttcatccagcactttttgcatcagttctaaatactgtttcatggttcctcaggaaacgtgttgctgcgggcggcggcgatatgcccaaaccatcatgatcgcgccagcgataatcatcgggatagagagaatctgccccatgctgatgtactgtacccacgcgccggtaaattgcgcgtccggctggcggaagaattcaacaatgatacgaaacgcgccatagccaatcaggaataatccggagactgcgcccatcggacgcggtttgcgaataaagagattaaggatgataaacagcaccacgccttctaatgccaactcatacaactgggaagggtggcgtggcaatacgccgtaggtatcaaaaataggctgccattgcggatgtgacggcagcagcgcaatatcttccgcgcgtgagccaggaaagagcatggcaaaccggaagtcaggatcgacgcgcccccacaattcaccgttgataaagttgcccagacgcccggcgcccaggccgaacggaattaacggcgcaataaaatcagacacctgaaagaacgagcgcttcgtgcgcctggcgaagataatcatcaccagtatcacgccgataagcccgccgtggaaggacatgccgccgtcccagacgcggaataaatagagcgggttatccagaaacagagggaagttataaaacaggacatagccaatacgtccccccaggaagacccccaggaaacctgcatagagtaaattttcaacttcgtttttggtccaaccgcttcccggacggttagcgcgacgcaccgccaaccacatcgcgaaaacgaaccccaccagatacatcaagccataccagtgaagcgcgacgggcccaattgagaaaatgaccggatcaaagtccggaaaatgcagatagctactggtcatctgtcaccacaatttcttgttatttcgctgaagagatagcgattgataagcgcgcctgcgcgttgcagacgctccaaaggtgcgaataatagcacaagggttaaaagcgagatgccgattaccgttaaaagatatgtatacgcattgtctttcatcttgcaggcgtgttgtctgcgccgtgaatccacagtcactctcttttcccgctccagtcgttacaaccctcctcgaatcaatccccccatcccgcggcgctccataaacgccgccacctgatgacgcacttcggtcgccatctgcgcctcaaggctgcgtctggcaagggtttgcgcgtcttcaaaatcgatatgccgcagcagatatttcacacgcgctaccgaacggccattcatcgaaagatggcgatatcccagaccgataagaatcgccacgcacatcggatcgcccgccatctcgccgcacaagcgaagatcgaggccatgtttttcggcttcctgcgcgatcatggacagtgcgcgcagcatagccggatgcagactgtcgtaaatactggccacgcgggtattgttgcgatctaccgccaggatatattgcgttaaatcgttggtgccgaccgagataaagtcgatccggttagccagatgcggcagcataaataccattgatggtacttccagcataatgccgatacgcggtttcgggatcgcatagccgatcatctcctcgacctcgcgcccggcgcgttcgatcagacgccgcgcttcatcgacttcatcaatactggtgaccatcggcagcaaaatgctgaggttgccagtcgccgcattggcgcgcagcatcgcgcggacctggatcaaaaagatctccggctgatccagcgtaatgcggatcccgcgccagcccaaacacgggttctcctcgctgatcggcatatagggcagttgcttatccgctcccacatccagggtccgcagcgtcaccggtttatcgttaaacatttgcagcatcccttgatactgcgccacctgctcttcttccgagggaaacccgctttgcagcataaagggaatttcagtacggtacaggccgataccgtcgatccgactgcctaacttttcctcatgctcgggactgagcccggcattcagcatcactttgactcgctcgccgcttttcagttgggcgggaagattgacgtcgtcctccgccagacgactgagttctatctcttcactaatgagccgctgatattcctgaataagcacgggttcaggatcgaccagtaattcaccgcgatagccatccaccaccaacgtacggcgatgtagcaccgaaggctggatatcagcgcccatgacggtcgggataccgagcgcgcgcaccataatcgccgcatgcgagtttgccgcgccgtcgcgcaccacaacgcccgccagcctgtcctgcggcagctccgccagggtggtcgccgacagctcatccgcgaccagaataaaacgttccggccaggcgtttggcccctgaactgaatcatcaagatggaataacagccgctgccccagcgtgcgtaagtctcccgcacgttctttgaggtagttatcggttagcgccgcaaattgctcggcaaatttttcgatgatttttttaacggcccactccgcaacagcgcctttgtcgacctcggcgaagagttcgcgacgcagtctggcgtctgaaagcaggtgtgagtacagatcgaaaatggccgccgtctctttttgcgcgccggcggcaaagcgtttgctgtatcgtcggaattcgttcgccgcctcttccagagcgccggtcagtcgttcgcgttcaagagaggtatccagcgtagacgcttcgtaaacctgttccatcagcggcatggtcgcgtcttgccagcccgttgcgatagccacgcccggcgccgcaggaagcgcgcggattcgcgtctgccggtattgcccgaacagcgctgtgacctgcgactgtgacaggatagccgccatctgcgtagcgagcgtgacgaggaaagactcttcgctttcatcgtactggcgcaattcgcgctgctgtacgaccagcacgccgagaagttggcgacgctgaatgatcggcacgccgagaaacgcgcgaaaacgctcctcttttaccgaaggaatgtatttaaagctgggatgtttttgcgcatcggcaaggttaatgggttccgccagtctgcccaccagaccgacgatcccctcatcaaacgcaagcgcaacggttcgaccacgcggttttttcaacccccgcgtcgccatcaggtaataacagcgtcggtcatgatcggccaggtaaaccgagcaaacctctgtatccatcgcaagacagatatccgtgaccagaatattcagcgcctcgttcagacgcggcgcactggccactttttcgactatttcgcgcaggcgagtgagcataatttgcgtggcttaacctcttttacgtcgataagcaggcgcgctttgtagcttagggggattatcctgaagcgccatgacaacacttgcaaactctttcattaccctgcggtagacatcgcgtttaaatgacaccacttgtcgaaccggataccagtaacttacccagcgccagccgtcaaactccggcgtactgctggtttgcatattgatttcggcgtcggcgctcattaactgcaaaagaaaccacttttgtttctggccgatacataccggctttgtgtcccaacgcaccaaacgttttggtaacttgtaacgcaaccagttgcgagtagaagcaaggatccgcacatctttacggcttaacccaacttcttcaaacagttcccggtacatcgcctgttctgccgactcccctggatttatcccgccctgcgggaactgccaggagtgctgaccaaatcgccgggcccacatcacctgcccctgacgattacaaattacgatacctacatttgggcggtagccatcgtcatcaatcaccggactacctcaacataaaccttatatatgaacgattgtttcatactccagtgaggcggtaaaccactctgtaatagtgacacagcctaataacaattgaataactcacagtaaatagccgagttataaacagatgatgacgcccttgcgccattttattcaccttttctgtggatatagttgtgaagaagtatggaattaccacgggaaaacccagaacagtctgaattcctcatgctggagacagtaaaaatagtgccttatattcattgcgttatagacaaatcttacatgctaccttcataaagcgtgaccagcatcacatctaagatccttatgctgatgaaagatcaaccagcgtcggttttatccacagattgtgccaataacttacgcactatttgtctgaattttcgattttcgtcgcacgtcaaggctgtaaatggaaacagtagtggcggttttacacagttatcccaactttctgtggataacatagtgtaagatcctgtttattgtcagtgaccagaattggaaaacccgcttcagcgttgcgcaacacgaagaaacaacacaaaaaaggcaataaaaatcagtctattgaatataagacacagaaaaagataaactctgcccatacggtataaaatcactgctcattttttaatctaaggtaatggtaatgtccgctctttgtccgctactgactccgcctgcttcggaagcattgctgttagcccaggcgcggcagctttccggctatacgttaggcgagctggcggcgatggccggcattaccacgcctaaagatttgaagcgagacaaaggctggatcggtgtcttgctggagatctggctcggcgccagcgccgggagcaagccggagcaggatttcgccgcgttaggcgtagaactgaaaaccatcccggtggatagtctgggtcgtcctctggaaacaacctttgtttgcgtggcgccgttaaccggtaacagcggcgtgacctgggagacaagtcacgtacggcataaattgaagcgcgtgctatgggtgccggtcgaaggcgatcgcagcataccgttagccgaacgccgcgtaggttcgccgttactctggagtccgagtgaagaagaggacaggcagctacgcctcgactgggaagagctgatggacatgatagtgctgggccaggtggaacgcattaccgcccgtcatggcgaagtcttgcaactgcgacccaaagccgccaatgccagggcgctcaccgaggctatcggcgcgcgcggggaacctattttgacgctaccgcgtggattttatctgaaaaaaaattttacgcaggcgctgctggctcgccattttttattgcagaatccgtaacgtccattacacgcaaatgcgcctccgctatggctacgcgtcggaccgacgctcgataaacgtaagcgtattgtcgccgctattttacaccgttcctggttgcgcaaattcagcctgggctttcgcccgtcactcgacgggcctataattaccgcttctttttttggcaggactttgttcgatgttatttgcatggataaccgatcctaatgcctggctggcgctcggtacgctgacgctgctggagattgtacttgggatcgacaacattatttttctttctctggtggtagcaaaacttcccacggcgcaacgaaaccacgcacggcggcttgggttggcggcggcgatggttatgcgcctggcgctgctggcgtcaatcgcctgggtcactcggctgactaatccgctgtttgagcttttcggcgaagcgatttccgcccgtgatctcattctgttactgggcgggttatttttaatctggaaagccagcaaggagatccatgagtccatcgaaggcgaagaagaagggttaaaaacccgggtttcttctttcctgggcgcaatagtgcagattatgctgctggatattattttcagccttgattcagttatcacagcggttggcctctccgatcatctgtttattatgatggcggcagtcgttattgccgtgggcgtcatgatgtttgcggcacggcccatcggcgagtttgtcgatcgtcatccgtcggtaaaaatgctggcgctctcctttctgatcctggttggctttaccctgattctggaaagtttcgacgttcacgttccgaaaggttatatctatttcgccatgttcttctctatcgcagtagagagcctgaacctgttgcgtaataaaaagaatccgctgtaatcctgtctcgctcccccgccggggagcgaatactcactttatttcctttcttctcacagattaagattttgctgcttccgacatgcagagctgcgcgttattactagactattatcagacatatgattaacagactattatcagatgcaggctatgtgaggacaaacggatgaaaaagtgggcagttgtaatttccgcagtagggttggcttttgcggtatccggatgcagcagcgattatgtaatggcgacgaaagatggtcgtatgatcctgaccgatggaaaaccacaagttgacgatgataccggtctggtcagctataccgatgcacagggaaacgagatgcaaatcaaccgtgacgaagtatcccaaatcatcgaacgttaagcggtggcctgtgatcgaggtcagcgttctgcaagccttcaggctgcgtcccgtaacggtgcgtggcgaccacgcccggtaacaattacgccgcgcagcctgcaattttactttcccttttgccttccctctgccatttttattgtcctttgtcgggaatttctgacttcataataaaaaggaaacggctatgcactatcaccgtataccccacagctcgctcgaagtaagtacgctagggctgggcacaatgacatttggtgaacaaaacagcgaagccgacgctcacgcacagctcgactatgccatcgcaaatggcattaaccttatcgacgccgccgagatgtatccggtaccgccgcgcccggaaacacaagggctgacggagtcctatatcggtaactggctcgccaaacgcggcaaccgtgaaaaactgatcatcgccagcaaagttagcggaccggcacgtaataatgatcaaggcatccggcctcatcaggcgctggatcgtaaaaatattcgcgaagcgctacacgacagtttgacccgattgcagaccgactatctggatttgtatcaggtgcactggccgcagcgccccactaactgcttcggtaaactcggctataactggacggactccacgccagtagtaagtctgctggagacgttagacgcgctaagtgagtttcagcgagcgggtaagattcgttatattggcgtttcaaatgagacagcgtttggcgttatgcgctatctgcatctggcggaaaaacatgacctgccgcgtattgtcacgatccagaacccctatagcctgttaaaccgcagctacgaggtcgggctggcggaagtcagccagtatgaaggtgttgaattgctcgcctactcctgtctggcgtttggcacattaaccggtaaatacctgaacggggccaaacccgcaggcgcgcggaataccttgttcagccgcttcacacgttacagcggcgaacaggcgcaaaaagccgttgcctcctacgtcgatatcgcgaagcgtcacaatcttgatccggcgcagatggcgctggcctttgttcgccgccagccgtttgtcgccagtacgttactgggcgcaaccacgatggcgcagctcaagacgaatgtggaaagtctgcatctgacgttaagcgaagaggttctggcggagattgaggcggcgcatcaggtttatacctatccggcgccgtgatggtcagtgcccggtggcgctacgcttccgggcttacagagacaatgtaagcccgataacacgcactcgccgcccggcatattcactcagtatgatgcctgccggcgctgccagatccacagcgccgcgatcgccagcgcgaacagcacgccaaagccgatacctatcgccactgccggaacgccaaccagcaccgccagcgagtacagtcccagcattaatagcatggcgctattctcgcccagattttgtacggcaatggcattcccggcgccaacgctcttcttaccgcgctcctggagcaaagcgttgagcggcaccacaaaaaagccgcccagcatacctatcaacagcaacaaggcataagcaggcagcaatgcgtgctgtaatgagaagatcgcaaccacaacgccaatcaaaatcccggcgggcatacagcgcgatacggtctccagcgtcaccagttttgccgccgcgcccgcgccgaccacaatgcctaccgccaccatggcgttcaggtaagtcggcgtggcgttatccgtaatccccagcgccaccggcacccacagcaccagcagaaaacgcagcgtcacgcctgcgccccagaatagcccggtccccaccagcgaaaaacgcgtttcaccgttacgccaaaggacaacgcaagcgctgaagaaactacgcgtcatcgccgacaaccgccaggattgtcctggacgcgccgccacaagcttcgggataaacaggttcgccgccactgcgccagcgtaggccaacgcgcaggcaaccagcgcagcgatgacatgccagtcggccaatacgccgcccgcgacggaaccgagcaaaatcgccgcaatcgtagaggcttccatcaggccattggctttcaccagcttatcgcccgtcgtcagttcgcccagaataccgtatttcgccggagaataagccgccgcgccaatcccgaccaacgtataaccgacaaaaggatttatgccgaggcagatacctgccgctcccgccagtttaagaccattggcgaccatcatcacccggcctttggcaaagctgtccgctatctggccgacaaacggcgcaaaaagaatgtaagcgcccacaaacaccatttgcaaaacaggctggctccagtccgggtaaaactgagctttcagcagtgccagcgtcgcgaacagcagcgcattatcgccaaaagccgagagaaactgcgcgacaatcaccgacagcatccctttcgaccagatggaggtgttagtacgtactgactcactcatgatgttgttccggcgcatccacccaacttttcagcgtcacaaaatcgggtttcccgctgccaagcaagggaagctgcttcagataacggatatcacgcgggacggcaagttccggaataccgtgttcacgagcatagtgctgtaacttttctcgggtgagttcgctgtcagtcgtaaacagtaccagcgcttcacctttgctggcatcgcttttaatggcggtagcgtgcattttgtccgccgaaacgccaagcgccagttgctcgaccatctccagcgagaccatttcgccagcaattttcgcaaagcgtttcgcgcgcccctgaatctgcacaaaaccattttcatcgaagcgtacaatatcgcccgtgtcgtaccagccgcgctcagtttcgcctctggagttttccgccgacggcacctccagcacgcccggtttttccacgcgcagatagccattcatgatattcggccctttcagctgtagccgaccgccgttttcaataccgggcaccgccagcagacgcgcgtccatgccaggcagaatgcggccaacagtgccaggcttagccgccatcggcacgttaatcgagactactggcgcgcattccgttaccccgtagccctcaagaatgcgcagaccgaatttatcctgccacagttgtttggtgctctcctgaagtttttccgcaccggccaccacatagcgcaggcgataaaaatcatacggattggcaaagcgcgcatagttgccgaggaaggttgacgtaccaaacagcacggtacagttacggtcatagaccagttccggcacaatgcgatagtgcagcggacttggataaagaaatacttccgcgccggtcaacaacggcgtaaacaggcccaccgtcaaaccgaacgagtgaaagagcggcagcgccgacataaaacggtcattggcggtgaaatccgcaatcgtttttatctgctcgacgttcgccagaatgcttttatggctgtgcaccacccctttcgggtgcccttccgagccggaggtaaaaagaatgatcgccgcgtcttccggctgctgttttacctgcgccagtcgcggcgccaggaggtgggcaaaaatccacagcttgtcggcgggtgtgacgtccgcttttaaatcttccaggtaaacccagcgaacctgcgttagctgttccggcaggtgccacaatttacctttatcgaggaactggcgggaggtaaaaatcgttttaatttccgccgcggtaatcgcgctggtcagcccttttacccccgccgtgtagttcatcatggccggaatgcggcgacgagaaaccgcgccgaaaatcaccgccgcgctgatggcggcattcggcagcattaaaccgattttctcgccctcaacgctgtacttttccagaatccggccaacaaaaagcgtcttggtcagtaacttacgatacgtatccggcgtaaagttaatgtcctcaatacagtttttacccgcgccgtaacgatattgcgccgccagcaacgattcgtataacgtctcgcgcgggcgcaccgccatacgcgcttccatcatgatctggtgcagcatctcacccgctatcttacgtctgtcgcgcgcgcgcggcgcttccggcatcggtatttgcgtcggcggtaaaatatgaagctgaatgcgggggaataagcgccgtttaaccagacctttcaggcgactgaaaggggtcagctccgcgccgtcaatgcggagcggaatgacggttgcgcccgattttgccgccacaaagcctgcgccgtcataaattttcatcagcgagccggtcacggaaatccgcccttccgggaaaatcaccactggacgcccctgttccaccagacgcaccaggtgtttaatggacatgggtttagtggggtcgagcggcacaaaatcgatcagcggcgttaaccagcgcatataccattgctggctgatggaggtatataccgcaaagacaggccgtaccggcaaaaacagcgccagtagcataccatcgataaatgaaacgtgattgggggtaattaagacccggttcccctgtagcgcccggacatcgccagtgacgcgcacacgataaagcacgcgaaacaggttacggaaaaatccaaacagcatttcaactccctttggccgacaattcgctaaaagatgaattgtggcagattacacgagttgcgtaacaggagcgatagcaaaataggttcgaaaaaaaacctgcgcatccgcgcaggttggtgcaagagacaggtacgaagagcgtaccgaataatctcaccaatcaatacctctgggatcttgattgtgggcttcgcgcgtctgcatcgccagtccgaaaacgcaaaggaataaacggaaatgcaacgagttgtgtaaattatccgttactgttacaggttcaggcgaaacaaaaaaaaacctgcgcatctctacgcaggttggtgtaattcgtgtgatcaacaatgacgttgattccacctatcaatacctctgggatcaccactctatcaacctgactcgctggcctgccagcagacaatcgcaacagcgcttcgcaaactgtaacgaaagatttgtattgtcactttacagacgcatttctcccgtgcaggtcacatttgcccgacacggcggggcaagaggcttgaacagacgttcattttccgtaaaactggcgtaatgtaagcgtttacccactataggtattatcatggcgaccataaaagatgtagcccgactggccggtgtttcagtcgccaccgtttctcgcgttattaacgattcgccaaaagccagcgaagcgtcccggctggcggtaaccagcgcaatggagtccctgagctatcaccctaacgccaacgcgcgcgcgctggcacagcaggcaacggaaaccctcggtctggtggtcggcgacgtttccgatccttttttcggcgcgatggtgaaagccgttgaacaggtggcgtatcacaccggcaattttttactgattggcaacgggtatcataacgaacaaaaagagcgtcaggctattgaacagttgattcgtcatcgttgcgcagcgttagtggtgcacgccaaaatgattccggatgcggacctggcctcattaatgaagcaaatccccggcatggtgctgattaaccgcattttaccggggttagaacaccgctgtgtcgcgctggatgaccgttacggggcatggctggcgacccggcatctgatccagcaaggtcatacgcgtattgggtatatctgttccaatcacactatctctgatgccgaagatcgcctgaggggctattacgatgcgctggcggaaagccatatcccggctaacgatcggctggtgacgttcggcgaaccggatgaaagcggcggcgagcaggcgatgactgagttattaggtcgcggcagaaattttaccgcggtggcctgctataacgactcgatggcggctggcgcgatgggtgtattaaatgataatggcgtgggggtgccgggcgaagtatcgctcatcggttttgatgatgtactggtctcacgctatgtgcgtccccgactgaccaccattcggtatccgatcgtcaccatggcgacacaggcggcggagctggccttagcgctggcagggaaatgtcctacgccagaagtaactcatgtatttagtccgacactggtacgccgacattcggtgtccacgccgacggataccgggcacctgtcgacaaccgattaatcagggtagcatgatggcgacaatgctggatgtttcccgccatgcgggcgtatcaaaggccaccgtctcacgagtgctgaatgggacggggcaggtaaaagaaagcacgcgccagaaagtgtttacggcgatgcaggctctgggctatcgccccaacctgctggcacgctcgctggcgaatcgcaccagcaacagcatcggtctggtcgtctctacgtttgacggcttctatttcggcagtttgttgcgccgggcgtcgcgccaggcggagtctcataacaagcagttgatcgtcaccgatggtcacgatacgccggaacgagagcagaaagccgtacaaatgttggccgacagacagtgcgacgctattattctttacactcgctatatggatgagctggcgattttgtcgttgattgacgccacggaaatgccgctggtgattattaatcgcaacgtcactcaggcccgcgatcgcgctattttcttcgagcaggagacggcggcattccaggcggtggaatatctgattacgcagggccatcgcgatatcgcctgtattacgctgcctgttcatactcccaccggcacatcacgcgtagcgggttatcgcaaggcgctggaaaagtatggcattccctggcaaccggcaaaagtgaaatacggcgattacacgctgacgcgcggctatgacgcctgccgggaattactggaggaaggcgtcacgtttagcgcgctattcgcctgtaatgatgacacggcgctgggcgcggcaaaagcgctgcgccaggccggattacgcatcccacaggatgtgtcgctgtttggttttgacgatgcgccgggcgcaacctggcttgagccggggctttcaacagtctatttacccatcgaggctatgatagccaccgcgatcgatcaggccgttcgtctggcgaacagcgagccggtcgccccgatcccgccctttaccggcacgctgattctgcgcgagtccgtcgccgcgggcccgttttttcaacgtccggcctaatgatgcgcttcagagcatctccagcgctaacagctcttcaatggtttgacgacggcggatcagccgcgcctgtccattgtcaaacagcacttccggcaggagcgggcggctgttgtaattcgatgacatagacgcgccgtacgcgccggtatcgtgcaatacgaggtaatcgccggggatgaccgcaggtaaggcgcgtgtttcaaccattcccccttcctgctgcgtaaaaacatcgcctgattcgcatagcggcccggctaccaccgtctcgacccacgggccattttcaagcgcgcgaccatccgccgccagcgccgaaatacggtgatagctaccgtacatcgccgggcgcatcagatcgttaaaaccagcgtcgaccagcacgaaatggcggcttcccatctgttttacgctacgcacctgcgttaccagcacgcccgattgcgccaccagaaaacgtccaggttcgatctcaagtttgaccgcatgtcccagatggcgggcgatttgctcgcgcgccgcgttccacaggccatagtaatggcgcgtatcaacgggctcttctccctcacgataaggtatcgagagtccgccgcctgccgaaatcgcctccacatcctgaccacattccagcacctggcgtaccatcgcgccgcaaacctgctccagatggccataatcgacgccggaaccaatgtgcatatggataccgacaagtttcagtcggtatttctgcattaccgccagcgccgccggaagatcgctatgccagatgccgtgtttgctgttttcgcccccggtgttggttttctggctgtggccgtgaccaaagccaggattcacgcgcaaccagacgcgatgcccaggcgaaacctgaccaagctgcgtcagcatatctaccgagccggcattgaccggaatatgcagttcgctgacgcgcgccagcgtggcggcgtcaatcacatcggcggtaaaaacgatatcatcagggcacgtttgcggatcgtagcccgccgccagcgcacgttcgatctctcccaatgaaacagaatccaccttgacgcccagcgcgcgcattaagcgcaggatatgaatgttcgaacaggctttttgcgcaaaacgcacgacgtcaaactgctgcagggcggctatctgacggcgaataatgtgcgcgtcatagacccagaccggacagccgaattcagcaggcaatctgagcaaattttcagcgttaaggtcagtttcagcgtgataatgcggcaatgacataacaaactccggaacgggctttttaacgattacgccataccttagaaagaataaaaaatatcgttttattgtcagtctatgcaaaaatgatatgggataaatgattcagggaaacgtatggctgccgttaatttacgtcacattgaaatttttcatgccgtaatgaccgccggaaatctcaccgaagcggcgcggctgctgcatacctcgcagcctaccgtcagtcgcgagctggcgcgttttgagaaagtgctgggattaacgctgtttgagcgcacacgcgggcgcttacatccgacggtgcaagggctacgcctgttcgaagaggtacaacgctcctggtatgggttggatcgcatcgtcagcgcggcggaaagtctgcgcgagttccgtcagggcgaactctctatcgcctgcctgccggtcttttcacaatcctttttgccgccgttactaccgccttttctggcacgttatccggatgtcagcctgaatattgtgccgcaggagtcgccgttgctggaagagtggctctccgcccagcgccacgacttagggctgacggagacgcttcatgccccggcaggaacaacccgtaccgagttactaacgctgaatgaagtgtgcgtactgccctgcgaccatccgcttgccgccaaaacggtactgacgccagacgattttcagggggaaaactttatcagcctctcccgcctggacagctatcgacagttgttggatacgttatttgccgaacatcaggtgaagcgcagaatggtggtggaaacgcatagcgcggcctccgtctgcgcgatggtgcgcgccggggcgggcgtttcgatcgttaacccgctgaccgcgctggactatgccgccagcggcgtcaccgtccgccgcttcagcattgacgtgccctttaccgtcagcctgattcgcccgctacaccgccctgcctccgcgctggttgacgccttcagtaagcatttacaaacgcacctttcgcgcctggtcgaaccgctggaggttattctggggccgatgacgaaagcataaagctcacggcatctgcggcatgaattgccgtggtatcgaaaaccggtagcgcgctttgcgtctggggaacaagcaaacctatttcagtacagccaaaaataacgccctgcgcgccttgcgcagccagttgttcgataacctgtaaataatagtggcgcgacgcgtcagtgaatgtcccctgacagagctcgtcaaaaatcacctgattgatacgcgcccgatcgtccgcctccggcacgatggtctcaatcgcaaattgctgttccagccgcccgcgataaaaatcctgttccatcgtatagcgagtccctaatagcgccacgcgatgcaacccctgacgggcgatagctcgcccggtagcatccgcgatgtgtaggaaaggcagagaacaacgagattcaataacgtgcgcgattttatgcatggtgttggtacacagcacaatgccttctgcgcccgcctgctgtaacccatgggcggcctgcgccaggatatcgcccgctttatcccactcgtcgcggcgttgacatacttcaatatcgtggaaatctacgctatgcagcagtaagctcgccgagtgcaggcctcccaactgctgtttaataccttcattgattaaacggtaataagggatagtcgattcccagctcatcccccccaacagtccgatcgttttcactgcgctctcctttttgtaaagcattatggcagtgaagcaaacttacacatccgtttccagtctatttttcatcatgccggataacaggcgtcatccggcatgggaggggggattacacgccaatatttcttagcttctcgcccgccatcagcttgcgttcgatgtgctccagggtgacatttttggtttccggaatcagccagaaagtgatgccgataaaagcgatattcagcgcggtgtagagccagaatgtacctgccgcgccaatgctgtccaacagtgtcaggaatgtcgcgccgatgatcatgttcgatacccagtttgtcgtggttgaacaggtaatgccaaaatcacggcatttcagcggctggatttccgaacacagtatccacaccaccggagcggcgctcatcgcgtaaccggcgatacacatcatcgtcatcccaacggaaagccaggagagaccgcttgatgccgtaccgttatcaaactgcatcaggcagtagcccaacaccaatgtccctaacgccattacgctgaaaccgatttttaacgccggtttacgcccggccttatcgaccgtaaagacggcgataaacgtcgcgaacataaaagtcagtccgaccaccagcgtggcgatcatttgctgttccgtggtggtaaagccggccattttaaaaatgcgcggcgcatagtacataatgatgttcatgccggtgaactgctgcattgcctgtagcagcataccgaggaacacggcgcggcgaacattgcggttagctttaaataatgcccaccctccctgcttgagtttgaggctttcccgaatctcattcagttcatcacgggctttttccgaggtatcgcgcagcatacgcagcacctcttccgcttcaatatggcgacctttttgcgccagccaacgcggactattcggcaggaataccaccagaataatgagcaacaccgcaggcagcgccagcacgcccaacatcgcgcgccagttgccgctgtagctgaatgccgtatcggataaaaaagccagcacaatgcctaacgtcaccatcagttgatacatactgatcattttgccgcgaacattttcacttgccatttcagagagataaagcggcgcggtataggaggcaatccctactgctacgcccagtatcacgcgggcgccaatcaatacttccacgctggaagcaaacgccgaccccagcgagccgagcacgaacaaaatcgcgccagccatcaggctatacttacgccccagccggaatgaaagccagccgttaaataatgcgccaattgccgcgccaagcatcatgctgctgacgacccattcctgcagccggctggtcagtacgaaatggtcggtaataaaaggcagcgccccggcgataacgccgatatccagaccaaataacagtcccgctaccgctgcagaaaccgaaacaaacatattcatacgtcgtgtgtcgcgaagcgaacgcggcgttaaagcagagtcatgattaatagagaccatattttcctgccacaacagagtaagacatagcctgaaagtacgggatactcttcctcaagtgtcaggctggaaacggcataaatatggattaaatggctacgctatagcgatatgtgatggatattacactttttaaatttaacgccgttgccgggtatttttttaaaccaccaatatttcaatgaattaaagcattgatcatagctattatttaacaatatatggattaagttaaacccacaatatggactatgctaatgagatcataaaaaaaccctgtacgaggacagggctttatcagttttttcggccaaagcgtcgattttcccagaaacgcatttgtcagtagcggattaacgcgccagccaaccgccatctaccgctatggtatagccgttaatataatcagcggcgctggatgccaggaagactaccggccccattaaatcgcccggtagcccccaacgtccagccggaatacggtcgagaatttcggcgctacgttgtgcatcagcgcgcaattgctgggtattattcgtggacatatagcccggtgcgatggcgttcacattgatattgtgtttcgcccactcgttcgccatcagacgtgttattcccattacgccgcttttcgacgcggtataagacggaacgcgaatgccgccctggaaggagagcatagacgcgatattaataattttgccgccgttgccctgggcaataaaatgttttgccgccgcctgagacataaagaacacgctcttgatgttcaggttcataacgtcatcccagtctttttccgtgaaatcaatcgcatcttcacgacggatcaaacccgcgttattcaccagaatatcaatatgaccgtattccgccaccgcccgttccagtaatgccggaatgccatcgatttgacgcagatcggctgtcaggcttaaaaaacgacgtcccagagcggtgacgcgcgcaatagtttccgtcggttcaacaatgttaataccaacaatgtcacagcccgcttccgccagccctaacgccatcccctgccccaatccggtatcgcaccccgtcacaaccgcgactttaccttcaagagaaaatgcattcaaaatcattgttaatccttatttttgtcatgcctgtcacgcacaggcgttatcaccggtcgcgactagcgcagatcttgtaccgcaacgtgatccatgtcatcgaagacctgattttctcccaccatgccccaaacaaacgtataggctttggtgccaacgccggaatgtattgaccagcttggggaaataaccgcctgttcattacgcatcacaatatgacgggtttcctgaggctgccccatcatatggaaaacgcaactgtcctcttccatattgaaatagaggtacacttccatacggcgctcatgggtatggcatggcatggtgttccatagattgccgggcgccagttcggtgagtcccatactgagctgacaggtttccagtacatccggtacgaaatatttattgatagtgcgacggttactggtgaggttatcgcctaaggtgacgggcgcaacgtcggcaggcgacacttttttcgtcggataagcggtatgcgctggcgcgcagttgtaataaaacttcgccggtctgctcgcctcattgctgacgaagaccagctctttcgcccctttaccaatatacagagcatcacgatgaccaatgtcatggcgctgcccgtcaatgataatggcgcccgcgccgccaatattaatgacgcccagctcgcggcggtccagtaatcgggaaacgccaagctgtttacctacttctccgccgatttcaacgggatggctgacgggcataatgccgccgacaataatacggtcgatatggctgtagaccatcgtatattcatcagcgacaaaaatattttctattaaaaactcgcgtcgcagcgcctgggtgtccagcgttttagcgtgctcgctatggatactttgccttacgtccacttttccctccaatgataaatcgatcgcaatggcacaaaatcaaaacactgttttgatttatttaacggcatcatagtcgcctggataaaggttttcaacaataaataaaacaacgtttcatttatatggttggttatttttaaaactgctgtagcgatcacgatcggcgctaaaacttacgcatttgtctgattttcagacatgcgcgccagatgctgtatgcggttacccagataaaaattggagcttgttttagaacgaggtctgatgtgcgaattgaattaaaagcggtatgcgtctgcaatgcccgacgcggcaagacgttccgcgctataacgaaaaagggggttctgtcactggctttgccctcgtgatagagggctttttatgacggaatactgaaacaggaaaaggatggctggcgcaggatcagtcgcgttcaatggttaaagcaacgccctgaccgccaccgatacacagcgtcgccaggcctttacgcgcgtcgcgtttaaccatttcgtgcaccagtgaaaccagaattcgacagccggaagcgccaatgggatgccccagcgcaatcgcgccgccattaacgtttacccgtcgctcatcccattccagcatttttcctaccgataacgcctgggcggcaaacgcttcgttggcttcgataaggtcgacctccgtcagttgccagccggcacgctccagacagcgccgggtagcatataccggcgcaatccccattagcgcaggatcgacgccgacgctggcaaacgcgcggatgcgcgccagcaccggcagccccagcgcctgggctttcgcctcgctcatcatcatcaccgcggcggcgccatcgttgattgaggaggcattacccgccgtcaccgaacctaaactatcaaacgccggatgcagcagggctaacccctccgcactggcgtcggcccgcggttgttcatccgtatcgacaattgcggtctgcccattacgttgcgtgacgatggggacaatctcatctttaaaacgtccggtatcaatcgcggccctggctttttgctgcgaactgagcgcataagcatcctgtaactcgcggctgatgccatattcccgcgccaggttttctgccgtcacgccaatgtgataatcgttgaaggcatcccataagccatcatgtaccagactatccaccagattgtcggcatcaggcaacgcgccgctacggctgtcattgaggacatgcggcgcacggctcatattctcctgcccgcccgcaataacaatgtccgcttcgccgcactgaatagcctgcgtcgccaggtgcaacgcttttaaaccggaaccacaaacgtcattaatggtaatagcggaaacggtagtcggcagccctcctttgatggctgactggcgcgccggattctgcccggcgccagccgtcagtacctgaccgaggatgacctcatcgatagcgttagcgtccacgccggtgcgctcaattaacgcttttacgaccatgctccccagctcgacggcggaatgacgggccagcgttccctgaaaacagccgatgggtgtccgtaaagcccccactatcacaacctctttcattaccacctcagcgcaaaatgacaccgccatagtagagcattgttaaaattagttttcttgattgtttaaaaaaagtgagttttatcacaaaggaaatgacgctgatttgacggtgacgcagcttatttctgctgcaaatggtagcgaagccagttccccgccgttccgggcggcgttttcttgttccacagcaaatcaatagcaatcgccctcggccagccaggaacatccagctgcgccagcggtttttccgccgcaaactcttccaccagcgcgcagggcaatacgcaccagccaaatccctgaaccgccatgctcaacagtaataaatagtttggcgctgaccaggccgggccgcgcgtaatgttggcgttagagtcaagataggtattcagacgcagctcgcgccaggtatgcagttgctcccattgcaggttcgtctgtgacgccaacggatgcgtggtcgccacataaacccccatccagctttgaacaggcagacgcgccgcgccaatgtctgtgggatagtcatcacgcgcttcaatcaggcctatctgggcacgccctttttgcagcaggtcgatgacatcatcattttctccgatcaagcattcaaactcggtatgcggaaattgacgatcaaactgcgccattaactcttccagactgtcagggtgcagggtatcagagaggacgaacgtgagtcttgcctccgtctcgccggataacgtcagcgccacctcatccagacggtcgctcgccgataaaatagcctgaacatagctaagcacccgttttccttcttcggtcagaacgggctggcgcgaagatcgatcaaataatgaaaatcccagatccgcctccagatgcgcaatggcgatactaatggtggactggcttttacgcaggcggcgcgccgccgcagaaaacgaaccgcaagagacggtctcaacaaatgccattaaagcttcaggtgagtaacgcataacctatctactttatcgatggatgttatcttttaggtatcacattaaacgataaaatagcggaaatttctttagcttgattaagagtaaggttttttcgtttatgcaacatgacgccatacaacgtcgctcgctgccggagcgtattttccatgctgtctgttttgaaggtattgcgactgcgatactggcgccaacgaccgcctggctaatgcagcgctcggtgctggagatgggcggcctgacgatattgctggcaacgacggccatgatctggaatatcatttataacgctctgtttgatcgactgtggcccgcgcatcaggtgagacgaaccgccaaagtgcgcgcactccatgcgttaggatttgaaagtgggtttattgtcattggcgtcagtattgtcgcttgggtactgaatgtcagcctgctacaagcattcaccctggaaattggtttcttcctgttctttttgccgtacacgatgctgtacaactgggcatacgatgttttacgccaacgaatagtgactcgccgccaacagcgcgttagtgcatgatattgctcttttttgccgggatcgcaacgctcccggccctccgcctccacgacatccatctgcttaaaacgcccccaactgacgctatttatggtaaattgcgcttctttttgtgtgttttatagttgataaattcaaataatgtctaaaatttggtcaaaagatgagactctctggagttttgcattatacggaacggctgtaggcgcaggcactcttttccttcccatccagttgggatcggcaggcgcaatcgtgctatttattaccgcgctggtcgcctggcctctaacatactggccgcataaggcgctgtgtcagtttattctttcctcaaagacttctgccggtgagggaattactggcgccgttactcattattacggcaagaaaatcggcaatattattaccacgctttatttcattgcgttttttgtcgtggtattaatttatgctgtggcgattaccaattccctgacagagcaattagcgaagcatattcagatagatattcgcatccggatggcagttagcttcggcgtagtacttatcctgaatatgattttcttaatgggaagacatgccactcttcgcgtaatgggctttttagtctttccacttatcgcttacttcttgttcctttcgctctacttaaccggaagctggcaaccctcgttactgaccgggcagatgtctttggatagtcacacgttgcaccaggtatggatttctattccggtgatggtttttgcttttagccatacgcccattatttcgacgtttgccatcgacagacgggaaaattttggcgatcaggccatggataaatgcaaaaagatcatgaaggtcgcctatctgattatctgcctgagcgtgctgttctttgtctttagctgcctgctctccattccgccgtcatacattgaagacgcgcgcaacgaaggcgttaccatcctttccgcgctctcgatgatgcccaatgcgccggcctggctctctatttccggtattatcgttgccgtcgtggccatgtcgaaatctttcctcggcacctatttcggcgtcatcgagggcgcaaccgaaatggtaagaaccaccctacagcaggttggcgtaaaaaaaagccgggcgttcaatcgcgcgctgtctatcatgctggtttccgggattacgtttattatttgctgtattaacccgaatgccatctctatgatttatgctattagcggcccgctcattgcgatgattctgtttattatgcccacgttgtcaacgtacctgataccggcattgaaaccctaccgttcagtaggtaatttcattacgttggtcgtcggtttactttgcgtatcggtgatgtttttcggctaaagtaaaagatagccgggatataactcccggctattttatataagaatccagcacctttaatattacgtccagatcttcttcacgtctggcttcatcactctgatgaacgatatgctcggtcagatgacctttaatcacctcgcgcattaagccatttaccgcgccgcgaatcgccgcgatctgttgtaacacggccgcgcattcatgcggttcatccagcattttttttagcgctatcacctgtccctgaatcttgctggttctggctttaagcttttgtttgtcccggatggtatgtgacattacaacacctcactaacattaacgaatacaaattatagcattacgatgctactggggggtagtattctatactgggggggagtagaatgacgcccacataaaacaactaagaatcattctcatgggtgaattttcgacacttcttcagcaaggaaacggctggttcttcattcccagcgccattttattaggtattttgcacgggcttgaaccagggcactccaaaactatgatggcggcttttatcattgccattaaaggtacggttaaacaggccgtcatgctcggtctggcagcaacgctttctcataccgcgatcgtctggttaatcgcgctgggtgggatgtatcttagccgggcattcaccgcacaatcagtggaaccatggctgcagttaatttctgcgattattattctgagcaccgcgtgctggatgttctggcggacatggcgaggcgagcagcagtggctggcgggaaaccaccatcacgaccacgaccacgaccacgaccacgaccacgaccacgaccacgaccacgaccacgaccacgaccacgaccacgaccacgaccacgaccacgaccacgaccacgaccacgaccacgaccatcatggtcacatacatccggaaggtgcaacgtcaaaagcgtatcaggatgcccatgaacgcgcccatgctgccgatattcaacgccgttttgatggtcaaacagtgactaatggacagatcctgctattcggcctgaccggagggcttatcccctgtccggctgcgatcaccgttttactgatttgtatccagcttaaagcgtttacgctgggcgccacgatggtgctgagctttagtcttggcctggcattaacactggtgacggtaggcgtgggcgcggcgataagcgttcaacaggcagcaaagcgctggagtggtttttcgacgcttgcccggcgggcgccctatttttcgagcattctgattggtctggtcggcgtgtatatgggaattcatggctataccgggatcatgcagtaaatatgtaacgcttctgctcaggccgtatcattcacgtcgggtttcattccagaagcgtttttacttatcaaacggtatgaaaggccatacattcagcgtcccgcctgaattctgtattttactccactacaccacaggcaaaaaataccccaccgccaccgggtttagccggcgtgtcagtgtttctggatagggtcgccggaggcgggttattgcggagcgataaacggggttcgctgcagtgatttacaaaaccgggtaccaaacagcagttcccgtaatcggttccgcattcccagcttcaccagtaaccggtatttgtcctgccagatttgcttctcctgtgtattcagccttccacacaacgctgacaaccttcctcgtccacggtaaacttcctgaagcaagcgtaactgggccaggctcactccgcatgccagtatctcccggtgcatcaactgatccatatagttcatcaaccgcttcggattgttaaatatcggtggcacttccagaaagcccgtcaccggatccggagataacaaaaaggcgtccagcgctcctgtcctgcgcaggcgtgcgcccccggcccactgttcatcccgccgccaccgaataagtatctccgccagttcctgctccagcagcgccgggatgccgccgtataccttcagtaccacccggtcgctgaaaaacagctcatcgctgataatcataaccgggtagtccggcagtatctgtctcagggaatagaacaaaaagagatgttcacggggacgcagacacagtatcagtatggcctccggtttccgacgtaattgctgcaacagaacaggctgcctgtatgcggtttcacagttgcagcccggcataaatctccggaccaggtgtgccacggcgatcgtcaccggccagcagtcaccgtaaacgataatctgccgggccggtatccggttatgttccgtcatcctcatcctccttctttttcaggatcttccccgcatttctgttactgcacagccggttccacagttcatttgccatcgacctgtcaccattaccgacccggcgttttgataccagcggcggtccggctttttcacggcgcgtggacggggtgggactgtcaagaacccggataacataaatctcatagcgtcgtgctttattaggcagggtctggtgacggcagatgctgaccacccgcgatgttttgcttcgcagataggcaatcaggtagctggcccgtctggccgtgatgtgaaacgcctctgctatctggttacgctgaacccagttctgctgcaacaggcaccagtgtgccacaatgatatacaggggctcgccggcatactggcggacacttaccggaataaaacaggcatcatggttggtctgtccgggataatgaatatcgttaccaggggtaaggtactgcttttttgcgtgtgtattatcagggcacataaaacctctccataactgggtaaatgatttcccggaggtgaagaacaactcttaaatagtatttattattaatgtgtgtttattcgggattagttccccgataactcagtcagttcttttatttttattatctgcccccccgattagttataggtaacagtaacgggtattgcagcagaaaacgttcctgtctttacacttccccccggggtcggggttattactgcagtatataccttcgacacattaccggtgacagctcctgtaatagtaatatcccccagtacttcttgtttatcaaaagtaatctcttttcctttatcatcttttattgaaagccggagcccattaggctgacctttgttggggccatccaggctgacaagattcagagtttgcccggtatcctgtgtcagtgcacctttcccgaaggtgatggccagagggatcgtgaattcctgtcccatagccggtcgtaaaacctgcctggcgatcactgtaaaatttgcctgtctggtctgtgaaggttcataagtcgtataaatatgcccaaagttgacctgtaatggaacaatgtcaactttacccaatccgtttctgagaattctcacattaaaaccagataaaacaaatccgttttgtctcaaagaataagaaaaaggtacaatatttaaaacattacttatccccgtaaaagctgtaactgcactactctctgaatatgcttttgtatataagaaatccagtgttatccttacttttcgttctgtagtcccaacaggtagttttgtgccaaactcttttcgtaactcatttcctgactgagtactctttatttcatcccaggagaacgaaacaacacttgaagcatttcctgtttcttgaatggacattctgaatccaagtcccatcgcatctagtgtcttggtaaatttactgaagtagccctgattaaataccagctgtggaaattgcgtgtcatatcccatgtaacatttaaaaactgcatcctgattgattgtatagataaccgaatccgggccaggtttaaaatcatcggttgtcaaatttatacttcttaaattaatattctgaccggaagtgactgcacattcatttatacctagctcaaccgcatacactttagtcacacataaagagcacaacatcatcaccagcacggtcagttttgttttcagattaaaaatccattctgtcatgatgtcgcccctgcgtccttaaacgcgcagttcagggcatcgcaggtgtagcgattcatctgcagtcccccgtaatcatcaatataccccacccacagcgtccgggtttctgccggcagaacagcctttaaaggcaggttccccaggggcggcaccatcacgccctcgcggaaaccgctgagcctgtggctacggtctgctcccagccacgccacagtgatgtagtacggcgtcgggtttctgagggtcagatgtcccgcattccgctcagcagtcagctttctttccggctggtcactgctgcttctgataatggctttcggacggtaaaacagtttcagctggctctgcatggccagctgcaggacgttgtcgtcttccggcttcgggggaacgccccgcacgttaaaccagaacagtgtttccctgtcctgagggagcttatctgtcagcccgcgaacctgggtgatacggacctgggatttctgtccggcatcaatacgctgcagcggcggcagcgccatcagcgcatcggttctcaccccgtcagcatccgtcacccaggactgcgccaggaacggcgtggttttgtcatcgttattcagcgtgatggccaccgttttctgcggcgcatccatgataatacgggtccggtcaacattgacggccgccgggctgtactggctccatgccgccgccagtgcgagtaaaatcacacggcttcttctgctgtttttcacctgttttctcctttagacctgctctgtgacagggatatttttatctgcagggcagtaacagcggcccccggctgagtgtcaccgtttccggcagggtgagtctgcactgcacccggccatcccaggacacattcagggtccggcggtcttccccgctgagacctgtcaggtaggccagaccgccatctccgaccatccccgcggttctgccggttttcccggacaccaccagggcgccaaacggcggacttgcgccatcagccagccggatatgaccgagcacctgctccccctggttggcgtcaatcttccggtagcccaccgcgccctccgtcagcacctggctgatgacggagctgctgacgtccacgtcctccggcagggcggccacatcaaccgaaatatcgctgcggcgatagctgctgccggcgctcaccacgcccaccccgaagcggttggtcaccccgctgttgccgttcaccggcacaccggccacgtctccggtatctatcatcatgcggggctcattcccggccatcgactggctgaaagcggcaccgtgggcggtggcagtcaccgagccgtaccagctcaggcccaggctgcggtactgtccgggctgcagggtggcgtccgctgccgcttggccccacggcagacggctctgcacgctgccgctgaagctgctgttgctgccggtgtcataacggttatgaccggcgctgatgttccatgtagtgtccgggttatggaaatcgctgtaattcacggtctgctgcaggccgccccggttatctttctgtacgctgtaactcacctggcgactgtctccccacgggatactgatggtggcgtagacctggttctggctacccccgccggtgtactggttacgggcaaacgacaccgaggccgagagtccctgaaggtcgccgagactgaacaccttgttgaggctgagcatgtagttattgttggactgtgcgttccagtaattgagccggcttaccgagagggccgcgctcatgttgagtaccggaacggactggctataagtcacggtgtagctctgtttttcatgccatgcatcgccgccgtcagtggtccgacgctgcaggtactccggcatggacagaaaatggcggtccgagaagcggtatccgacgaacgccagggtactgccggttttatcaaacgttttggcatagttgatacggtagctgtaaccggactgcttctgcccatgcggcaaccgcgcatctgagcgggtgacgtccgcagacagagcgcccaacagccccatattctggccgatcccgagcgccgcggactggtagtcgccggtggaggcaatgaggccgccatacagcgacgtgttgttaaatgctccccaggtggcctccccgagcagaaagtcagggctgaccgtgctgttgttatgcgtcccgccgtacagcggacgtccggcggccaccttatagcgaacctgtccctggcgtgccataaaggggacgctggccgtgttgacctgccaggtccggacgctaccgtcgctttcccggacgctgacatccaggttgccgctgatattctggctcaggtcgggaagctcaaaaggccccggcgacacccgggtctggtacagaatgcgaccattctggctgacggtgacctgtgcattactgttcgcaatgccgctaattttcggggcatacccctgaagagagggcggcagcatgcgctcatcgctggccaaagtgagcccggcaaagcggaaggagtcaaaaatagcggagctgaggtacgtctgtccgagcgtcagttttgagcgcagtgctggcaaggcacggaacagatacgtctgcggcagataaaaatcggactgtgatgcgccctgcccactgtcaaaacggctgtactggtaatcgctccgcaatcgccaggcgccgagattaaacccggcggtgccgtagaggctgtagctggtagaggtttccccctgctgcggcatatagcggttgaccatcaggctgtaatcaagcaggccggcggtgacgccgtcgctccagcgtgaagggggcacccagtccgggtcctgataacgcatccaggcctggggaataatgaaggtcagacgctgattttcagcgctgtaccgtacctgactgtcagcggagcgcagctcaaggcattgcccgtccgggataccggtaacgggtttcaggccatgaataatcttatccttaagacccagcatggccaccatgtctgttgtcacacagatgacggccgcgtcgagtccggcaaccggtacaaccctgaccggatactgttcccgtaccggctggtcattgagccagatatcgagaatatagttaccgggcgccacatacccctcgcggctgaaggccgtgaggtccacgttagacaggttcccgctgtccagcaggctggcattgaactccgtggcctgcgacttcaggacggaaaatgtcagggtaatcagaatggcaagccgggtaattttcatggcatggcgctttcgtgttgtcgtccgtgtaacagacagcccgcaggcacagtcagatataaaagccgtccgatcccctccgtggacggcttctccctgtcgttatttaccgcgtgaaatcacaggtatttcagggtgtaggtgacggatgcgttaacatcgccaggagttgcggcatctgtcagggctatcaggcgggcaaagaagttgagttcgttattcccggcctgcagttgctgggcgtcgccatccggcatcggggtattgggtgtaatcagtgaggtgttgtcacctttcagaagctgcacaccaacatgctgggcactgccggtgctgacgtaagctttacctgaggtatctgctgtgccactgaaagagacggttactttagacattttccctgcggagccggctattgtagtttcattcggatcgaaggcgcagttctgcagatgaatggtgaacggttttgagtccgtggttgcattggcggtattcagtttacggtaagaaatctgtccaaacggaacggtgatcgcatcgtcgcccggtgcgatatcacagggtgagttggtgatggtaccagtgaaaagaattttacctgagccgaacgggcctgctgtgggtgtagtatcggcggcaaatacagaagcaccatacatcataccggcagccgccatggcaagtattattttattacgcatagataatatgtcctttgggtgaatgagaattattttgcaaaggctgaaaacaactctgagggtattaatgaaagcgttcagaaaagattcgtatgaataataaacgcctggtgttaaacgaagcacctgaactttccatcgaaaaatattgatttcagctaatgcctaatcagttgtaagaaaattcttattcaaattaaaacaataaaaatagatcgatacgatcgatgattatgatcgtaatttaagaataatcatcaaagaaatactttttaatgtaattataagcgggtgaatacctaacagacagatattcgcagcggacatgaaatattttgtaatatattatctggaatgtatgttttgcttttccattacactggatatttacaaaacataatactaatcatatataacaatgaaattactggtagcataaaaaactggatataatgcaagtaaaaggcatttaattccaaaacattaacttaataaatcattatgaaccatcataagtggaaggaataaaaaataataaatgaaatgatattcttctgtatttgtgatgggcatcacaatagatataaatgcaggtaccctgacatttctgaacttcgcggatgaaatttaaaaacaatgccgacagcaaagaacaaactggtaatagctgtcagacataatgctgcctgctgtaatgtatacagcaggctgggggatattaatgcgcggcgtcgtgctgcacggagtgcgtgggtgattcctgaactgactgagagtctacaactatgccatcctgagctgatttcagtaacagacctgcctgatagtattttccttcgttcatcaaggaaagcgctgtggtcacatccttacgggtttgctgaagaggaatgagttcctgattttcaataacactgacgcctgctagtttcagggcctctatagtcccttttttatctccttctttcattttctggtttgctttattaatagcatcatttttctggcccgcagggagataatcttctgctaccgtaatcgatgaatttatccgaatatagtggtctccttcaactggggcttttttatctgatttgacatacagattccagtcagtgctgtcatcgttcaggagtttttctgcttgcgcagccagttgttccgccttttgggtgcgaccattaaacaactcgaatcgcgacattccgatatcacgcatggcctgccaggcctgtccggatatcttgtcattattcagagtaacgttatcagtcatgtttgttgcggccataatatttcctgaaaacaggataaccatcagcgcaacgcctggcataatatggcttttcataatccatcatctccacaaagtaacattttttatcggattatcctattcagaaccggtaacccacgccaagattaaaaccattgctattaaggcttccgctgttatgggtagcatcaaaatccgctccctcataacccagagttatagcgacactactgaccggggtataagccacgccagcagaataaccatatccgaccttactgtcagactcatttatcccgtgatcacgctgatgcaataatacggggcccacttgactatacagacttaactggttatttattttccatgaggggcctgcaagcagggagtaataacgggttgttacacgaccattactgctttcatcggaatagcgctggcttccatttagccatgcaaatgaggttgtcagcccccagtccggtgacatttcatagttgtttgccagccgtaccccacgcaacgtcccggcgtgattagtatgggactgggcgtatccaagtgaaaatgtactggcattatcgtctgcccataccggactggctgcagcagacagcagaacaataccggtacttccggctaatagcattttgttcatcttcttctctccggttattttacctgataccttactggcatgtattaagttaaaatctttccgtgataacaaactataaataaatcttttaaattatgagcactgttacgccagcaaataactttatctccggctgtcgggaggctattcacgaaaatatatccaggccagaaacagtatttaataataaataaactggaaaataaaaactgacaaaaatagaagttcactgatatatacccaaaataatttgagttgctgaaaggcggcaagggagtgagtccccgggagcatagataacgctgtgaccggggagagcaacaaatctgccgggagcagacttgaacgtcgcatgcgacggcccgtcagggcgaggcccatggatggactgagtaatccgtagctaacacataagccacttgaagtatgaagggtatataacgggaaagaaggcctatcggcctggtaaatcaacgtctgtgatttaagttgcaggaaacggctatggagagggggatgcggcagttatcgggcagtaacggcattgttcagtgagtatccaggaaacaaaaaaagaagggagcggtactcccttcgtaaacatgtcagaatacgacattttggtactcttttatttattatctggccgtaaaagttatgctgttggcagatatctccagtcaacataaaaaaataccaccagctaaaaatgtgatgcaaaccaccattaagcaggtaaccaaattgactgtgccactaaatccggaaaagagtttgaatccggggataacatctgatgcagaaattagcaccagtcttcgattcggatacccggaatgcgttcaaattcgcggagattgtttgtgacgacgaccagtccgcggctaccggcatggccagcaatcatctggtcataaggcccgacaggtgttcccttgcgggccagttcggcacggatttgaccggtatgtatcgctgcctgtgtatcgtaatccaaaacctcaaggcgggagataaatccctccacgacggcaagattacgctccggcgccaggcttttttcagcaccgtaaatcagctccattaaggtgatggagctgatacacattcgggatgtattgaggttgaagcgttctctgatgtgttcgggcttatttttgatggtgaaaatacaggtattggtatcaagcatgaatttcagcatcaaaatccttcccgttcctgtactgcgggttgttctctggtactcataaaatcagtactggcgccttcgccatcgaaccagctgtcccaggattctccgactggagtaatgattctgcttctgccaaccgcaatgatttcgacatgtttcacatcctccggaaaggatatcgatttaggcaatctgactgcctgggtccggttactaaaaaaaagtgttgtgtgcataactgcctcctttctggatatacaacgcgtatatccattatgagtagaggcgatgtatatgtcaaagagatatacaggaaaaaataatccagtcacatgacgcgcactccgcagggcatccttgtccgactccggcatttctgaatacatccaatgaaggaaataccatgcaaacaatgcataaaaaacatatgtgcccatggcttctgcccggtttgctcggtctggctcggtgtgcgccagtaccgcatacttacgcagccatcattgaggcaggattttatccggaaggtacagatctccagcttgttcttaagataattgagaccgcgcgacaggaaatccgtctgatggactattccttcacctcttgggaggtggtccggttcgaacattcagtgagtacaaaattctccatgtcaaagtgatcgtcagcgacgaccgccacaccgaggtggacgcgtcagaatcgctgatcggacacgtcgcaatctacactctgacttataagccagcctgaaggggcatgttggctttgacgatcaggcaaaaaacaacggcgaataaagtcgtatgatgatcttcacatttatcatcatcagcgttcatattactcaacctgtaatcaacctctggcgtttttctgtatccatcacaaccatttccggtaaaggtaaaaaagggatttgaacctttccggagatgataatgaaggtaaatgcatggacaattttgcttatgtcggcgcatctgacggcctgtgccgtccctggcacagaaaaatatcagaccagcatggacagcgttacggcagaaaaaataagccggattatccagtcggatgtcattccttataaaggcgaaaaccatggagaagttatcagccgcgtatcgtctgcttttctcggaacaccttatcaggcggatacgctcatcggtgggcccggcatccccgaagtccttgtagcgaatttcaacggcgtggactgctttaccctggctgattacgttgaagccctggcccgcagcgataatcagaaatcgtttctgcataatcttgccaggactcgctacgccgcgggcaaagttgcttatctcagccgccggcacttcttctctgactggttcgccgcagcaccgcgtaatgcacgggatgtaacgccggatatcagccctgattatgtcgttgttgacaagcagcttaaccataaacctgatggcggcgagtacattcctggtctgggcatccatcctcgtaaaataaattacattcccggaagagccatcaaccagcaggtcatgaaccacctaaaaaacggggattatatcggtgtctactccccgcttgacgggctggacgtttcacatgtgggtatcgtagttcgccatgatgaacaggtgtggttcaggaacgcctcctcattggccgcaaacagaaaagtggtggacacaccgtttatggaatacatgcattccagaccgggcatcgttgtgctgcgggctgaatgataaagtcattaccggagtcgccagctgataatagccgtccgacataggtattgaaaccctgtgtactgtggggccgacacggaaaattgctgtaaattcgtggatttagtaaatactagaagatatttgtctggagcgggcgaagggaatcgaaccctcgtatagagcttgggaagctctcgttctaccattgaactacgcccgctttgagatgcgtaaagcattataaaccttacgctctggttggcaagagacttactggctgactggcgattaattcgccgtcagcacttcggtttactcccctgcggcggcagataacgcagcggatcgatggccgtcgcccggtagcgaatctggaagtgtagtcttacggatgcggcatccgtgctgcccatcgtagcgattttttgccccgctttaacgctttgtccattattaaccagcatggtgtcattatgagcgtaagccgtaatgtaatcttcattgtgcttaatcatgatgagattgccgtaaccgcgcagctggttcccgacatagacaactttacccgctcccgccgcataaacaggcgttccgcgcgcgcccgcaatatcgatccccttatttccgccctccgcggtggaataaggtaaaatcactttaccgttagcaggccatacccaacaacgctgccccaccggcggccaggaggattttggcaccgaagatgacggtctgaccgcagcagtttttgttgctgttttattgctggttttgcgtgttgaagtgctactctttgcgctgccgcgcactttaattcgctgccccacctcaatagtataaggcggagaaatgccattcagtcgggccagttctttcacgctggttcccgtagcgcgcgatatacgatacaacgtatcgccgcgcttaacggtatagacggagccggaatacgttcctgagccggaattactggaacaccccgccagcagcagccctgtgcataacagcaccgcaatacccaggctatttttgttcaggcgtcctgcgctcaaaaccattcctcactctattgacagacgccttatgatagcagccaaatgccgtatgcccaatccattgacgccggaaaggggccgcgtggatgatgatgccgcgaatatccgatatgccagcataatatcgactcacggcacaatggcgctcgtctgcgttctgtcagggcctgttttggtaatgcctttctttctgttatgcgctacgctgatcgtctgagtatatggcctggccatgctgccgggtcattttaattttcaggagctttcatgactgaggaacatgtcgttttattggatgagcaggataagccttccggcacactggaaaagtatgcggctcatacgcttaatacgcctttgcatctggctttctcctgctggctatttaacgaagatggtcagttgctggtaacacgacggtcgctgagcaagaaagcctggccaggcgtgtggacgaattcggtttgcggtcatccgcaacaaggcgaaaccaccgaagaggcgatcatccgccgttgtcggttcgaactcggcgtggaaattaccgatctcacccccgtctatccgcacttcagctatcgagcgacagatccaaacggtattgtggaaaatgaagtctgtccggtatttgccgcgcgggcaaccagtgtgttacaggttaacagcgaagaggtgatggactatcagtggagcgaatttaaaagcgtatggaaaagccttctcgctacgccgtgggcatttagcccgtggatggtcatgcaagcgtcagacgaacaagcgcgtgaacgactgctcaattactgccagcgttaaagattgcctgatggcgctacgcctgaacgaagagatgccggatggcggctgatgccccatccggcaatttacatcttatttcaccggacgcatcgccgggaacagaataacgtcgcgaatcgtgtggctgttagtaaacagcatcaccatacggtcgataccaattcccagacccgctgtcggcggtaaaccgtgttccagcgccgtcacgtagtcttcgtcgtagaacatggcttcgtcgtcgcccgccgcttttgcattaacctgatccaggaaacgctgcgcctggtcttccgcatcgttcaactcgctaaagccattgccgatttcacgaccgccgataaagaactcgaagcggtcagtgatttccgggttcacatcattacgacgcgccagtggagacacttcagccggatattcggtgatgaaggtcggctgaatcagatgcgcttcagcgacttcgtcaaagatctcggtgacgatacggcccagaccccagctcttctcgacgtgaatgccgatgctttcagcaatcgccttcgcggaatcgaagttgtccagatcagccatatctgtttccggacgatatttcttgatcgcttcacgcatggtcagtttttcgaacggcttaccgaagtcaaacacttcatcaccgtacggaacctgagtggtgcccagaacatcctgcgccagcgtacggaacagagactccgtcagctcgatcaggtctttgtagtccgcatacgccatatagagttccatcatggtgaactcaggattatggcgcacggagatgccttcgttacggaagttacggttaatttcgaatacgcgttcgaagccgccaaccaccagacgcttgaggtacagttccggcgcgatacgcaggtacatgtccagatccagcgcgttgtgatgggtgataaacggacgggcagacgcgccgcctgggatcacctgcatcatcggcgtttcgacttccataaagccgcgagcaaccataaactggcgaataccggccaggatcttcgaacgggttttgaaggtgttacgggattcatcgttagagatgagatccagataacgctggcgatagcgcgcttcctggtcctgcaggccgtggaatttatccggcaacggacgcagcgctttcgtcagcaggcgcagttcggtgcagtggatagacagctcgccggttttggttttgaacagcttacctttcgcgccgaggatatcgccaagatcccacttcttgaactgctcgttgtaaacgccttccggcagatcatcgcgcgccacatacagctgaatgcggccgcctacgtcttgcagggtaacaaaagaggctttacccataatacggcgagtcatcatacggcccgcgacggacacttcaatattcagcgcttccagttcttcagcttctttcgcgtcaaactctgcgtgcagttggtctgaggtacggtcacgacggaaatcgttcgggaacgggataccctgctcacgcagtgcagccagcttctcgcgacgtgccttcatttcattgttaagatcgactacctcgtcagcgccctgtgcgttttgttcagacatgttgattcctcatagccctgctttcaaacttgcttcgataaattgatccagactaccgtccagtaccgcctgtgtattgcgggtttccaccccagtacgcaggtctttaatgcgggaatcgtccaggacataggaacgaatctggcttccccagccgatatcggacttagtgtcttccatcgcctgtttttcagcgttctttttctgcatctccagttcataaagcttcgctttcatctgcttcatggcctggtctttgtttttgtgctgcgaacggtcgttctggcactgcgtcacgattccggttggaatatgggtgatacgcacggcggattccgtacggttaacgtgctgaccgcctgcgccagacgcgcgatagacgtcgatacgcagatccgccgggttaatgtcgatatcgatatcgtcgtccacttccgggtacacaaacgcggagctaaacgaggtatgacggcgaccgccggagtcaaacgggcttttacgcaccagacgatgtacgccggtttcagtgcgcagccagccataggcatattcgccggagattttgatagtcgcggacttaataccggcgacttccccttccgattcttcaatgacttctgtcttgaagccgcgcgcttccgcccaacgcagatacatacgcagcaacatgctggcccagtcctgcgcttcagtaccaccggaaccggcctgaatatcgagatagcaatcggcgctatcgtactcgccggagaacatccggcggaattccaactgcgccaacttctcttccagcgtattcagttccgcgacggcttcgttaaacgtctcttcgtcgtcagcttctaccgccagttccagcagcccggaaacgtcgtccagcccctgagtcatttgatcaagcgtatcgacgatcgcttcgagcgatgaacgctcttttcccagcgcctgcgcgcgctcaggttcgttccagacatccggctgttccagctcggcgtttacttcttccagacgctctttcttagcatcgtagtcaaagataccccctaagaacgttggtgcgttccgtgaggtcctgaatgcggttattcaccgggttaatttcaaacatggtctgatttcttttatttgacttgtcaaaatgcggttataagggcgaaatattagcggatttcgccccttaattacagcgaaagtgttgttaaatcgccccgatcatagcggccaaatatcatcgataataatctgtaaactacggttgccgcgaaactcgttaatgtccagtttataagccagttctacctcccgcacgccgttatccggccaacaggtcgtatcaatattaaatgcgatgccatccaacagcgggccgccgccgacaggctccaccatcaccttgaggtgacgctcgcccaccagacgctgctgtagcagacggaaacgaccatcgaataacggttccgggaacatttgcccccacggtccggcatcccgcaacagttgcgccacttccatagacatctccgccgcgcttaatggaccatcggagatcacctcgccttgcaacagggcaggatcgagccattccgtcaccagctcgccaaaccgttgctgaaactgctcgaatttatgctcttccagcgacaatcccgccgccatcgcatgaccgccgaacttgatcatcagatcagggtaaagggtatccagcctttccagcgcatcgcgcatatgcagcccctgaatcgaacggcctgagccttttagcgtgccgtcgcccgcaggcgcaaaggcgatcaccgggcggtgaaaacgctctttaatgcgcgacgccagaattccgaccacgccctgatgccattcaggatgatacatcgccagaccgcccggaagcgtttcactactgcgctcaagcttttcgcacaggataagcgcttccgcctgcatcccctgctctatttctttgcgcgtctggttaagcgcatccagctcgctggccagaacacgcgcttcgccgaggttatcgcacaacagtaacgccacgccaacggacatatcatccagcctgccggcggcattcaggcgaggccccaacgcgaagcctaaatcactggcggcaagctgctgcggatcgcgattcgatatctccagcaacgctttaattcccggacggcatttcccggcacgaatacgacttagcccttgccaggtcagaatacggttgttagcgtccagcggcacaacgtctgctaccgtacccaacgccactaaatccagcagctccgccagattcggcggcgcgatgttgcgctcgtcgaaccatcctttgtcgcgcaaaaatgttcgcaacgccagcatcaggtaaaacgccacgccgacgcccgccagcgacttagacgggaattcgcagtcgcgcagattgggattaataatcgcttcggcatccggcaacgtgtcgcctggcaggtggtgatcggtcacgatcaccggaatccccaacgtctttgcatgcgctacgccggcgtgggatgaaatgccgttgtctacggtgacgataagctgcgcgccgcgcgccttcgcctgatcgaccacttccgggcttaaaccgtagccgtcttcaaagcgattaggcaccagataactgatgttgtcacatcccaacgcacgcattcccaatacgcttagcgcagtactggtcgcgccgtcggcgtcaaaatcgccaacaacaataatgcgggtaccttcgcgaaaggcgttgtagaggatctccaccgcgttatctatgccgctaagctgttgccagggcagcattcctttcacgctgcgctccagttcgcgggcgctacgaacgccccggctggcatataaacgtcgtagtaatggaggaagatcggcggggagttccgccgtctcatcagcctcgcgccgacgaagttgtctctgttgtttcacgcgtattatttaccactggtctgtttttgatgctcatcaagaaacgctttcatctctttcggtccctgatagccaggcaccacatagccgttactcaatacaatggctggcgtaccgctaacgcccaactgcacgcccaacgcataatgatcagcaatgttcacgtcacagcttgccggtttcacgcccttacctgccatggcgtcatcaaacgctttgtttttgtctttggcgcaccagatagatttcatatcctgctccgcctggctttccagcccctggcgcggaaaagccagataacgtaccgtgatccccagcgcgttataatctttcatctcttcatgtagcttatgacaatagccgcaggtgatatcggtaaaaacagtaatgacatgtttctcatccggcgctttatagacgatcatctctttttccagcgcatttagctggctcatcagcagtttgttcgtcacgtttaccggatgcgcgccgctcacgtcatacatcggcccttgaataatatgtttgccgtcatcagtgacgtacagtacgccgctgtgagtgaggacggttttcatccctgccactggcgaggcctgaatttccgtactctgaacgcccagcttagccagcgactgacggatagccgcatcatccgcatgggccacgcctgaaaacaccgccgccagtaaagtgaacatcataaaacgctttttcataaactatcctttcctgtcagcactcatgcccgcggatggtgctgttgatgaagttgacgcaaacgctccgttgcgacatgcgtataaatttgtgtcgtcgaaagatcgctatgcccaagtagcatttgtacaacgcgcaagtcggcgccgtgattcagcaaatgcgtggcgaaagcgtgacgtaaaacatgcggcgatagtttttcgctatcgattccagccagtaccgcataatgtttaatacggtgccagaaggtctgccgcgtcatctgctgcgcacgctggctggggaataatacgtcaatcgatacgccattgagtaaccatggacgcccatgctccagatacgtttccagccaatataccgcctcttcacctaacggcaccaaccgctctttattgcctttaccgataacccgcaccacgccctgccgcagactgatatcgctcattgtcagccccaccagttccgacacgcgcaaaccggtggcatacagcacttccaacatagctttatcgcgcagctccaaaggttgatcaataagcggcgcctgcaagagccgttcaacctgcgcctcgctaagatctttcggtaaacgctgcggaagcttaggcgaggccaactgcgcgctcggatcatcctcacgatacttttcacggtacagatgctggaaaaagcgccgcatagcgcttaacaggcgtgcggagctggtcgctttgtatccgccctccacacgttcagccaatagcgtttgtaaatcatcagcctgcgccgtcgcaagcgtttttccgcgatgatgcaaccacgcaacgaccatcgataaatcgcgacgatacgcgcttaatgtattttccgccagatttcgttccagccacagggcatccagaaactgctcaatacgcgctaaatcctgttccattcgcgctccctacttcacgcttacttttggtgcattatgcctcattgtgccgtgaatgcagcgattctgttacactacccgcaacgctatagcagaatcgagatgtaacgtaatgaacatgggtcttttttacggttccagcacgtgctacaccgagatggccgcagagaaaattcgcgatatcctcggcccggagctggtgacattacataacctcaaggatgacgcccccgccttaatggagcagtacgacgtgctcattttaggcatccccacctgggattttggtgaaattcaggaggactgggaagccgtctgggagcaactggacgatctcaatctggaaggcaaaatcgttgcgctttacggtatgggcgaccagctcggctacggtgagtggttcctggatgcgctgggtatgttgcatgacaaacttgccctcaaaggcgttaaatttgtcggctactggcccacagaaggctacgaatttaccagcaataaaccggtcattgcggatgggcaactgtttgtcggcctggcgctggatgaaacgaaccagtacgatctcagcgatgagcgtatacagacctggtgtgaacaaattctcggcgaaatggccgaacactacgcctgaaaccttactcgctgtacttccctctcgacggaaccgcgtttacgccgttccgttagtgttggcctgatatcggctgctgtaacagtatccgacgcaactcacgccattccgcttcttccatgctatccgccgccagccataaatgctgatgacgtccagactctgcgcgtaaacgcaacaccatcccgctcttcagtaaccagggcggacgcaagagcgtccagtcctgcccctgccagcgtaagcgcccgtccatgagtagcttgatctctccctggcaggtattaatcctgcgctggctacgtacacagtcaaacacgaccagcgacagtagtatcatccataacggggtataactcagcggccagggcatcaataaaatcaccgcggcaaccagcccatgaatgagcaatgagatccactgagcgcgccatgagacgcgtaaatcagattgccacaggaccacgttcccgattccgtgtctgaatgagtcggaccatctgttccagttcagcgtcagccggtttaccgtgattcattaaccagttaaataaatccgggtcatcactctgcaacaaacggacaaaaatacgcttttcttcatcacttaaactatcgtactcatgttcaaaaaacggcatgatggaaatatcaagttcgcgcataccgcgacgacatgcccagtgaatacgtgctttattgtgaatatccatgttcttcctgcctcgcgaaaatgaagtaccgggctattgtaacgtgtttttggcgttgttttacgggaatctcagtaatctggaacgcgatcgcgaaataaaaggctgggaatcaatatgttcatccattttggataccgcctcgcaaaacgatcaatccgctctcaatgggctatttaaagcacttgcaatgaccgatggctcttttaccattaaccattattgttgcagctaaccaggacattatttatggcttttatctcctttccaccacgtcatccttcatcgtcagcccgcctgccgctgacgctgatcgcgcttgacgactgggcgctgtcgaccattaccggcgtagacagtgaaaagtatattcagggccaggtcaccgctgacgtaagccagatgactgaacagcaacaccttctcgccgcccactgcgatgctaaaggtaagatgtggagcactctgcgcctgttccgtgagcgcgacggtttcgcctggattgaacgccgtagcgtgcttgaagcgcaattaacggagctgaaaaagtacgccgtattttccaaagtggtcatcgcgccggatgacgaacgcgtattgcttggcgtggccggttttcaggcccgcgcggcgctggctaatgtctttagcgaactgcccaatagcgaaaatcaggtggtcagagacggcgcctccacgctgctatggtttgaacatcctgcggaacgattcctgcttgtcaccgatgtcgcgacggccaacatgttaacggagaagttgcatggcgaagccgaactgaataacagccaacagtggctggcgttggatattgaagcaggcattccggtgattgacgcggcgaacagcggtcagtttatcccccaggcgactaacctacaggcgctgggcggcatcagcttcaagaaaggctgctacaccggacaggagatggtcgcacgggcaaaattccgcggcgccaataaacgcgcgctttggttgctggcgggcaaagccagccgggtaccggaagcaggagaagatctggagctacagatgggcgagaactggcgtcgtaccggcgctattctggcggcgacgcagttggacgatggtcagttactggttcaggccgtcatgaataacgatttagaagccgaaagcgtcttccgcgttcgcgacgatgccaacaccctgcatatcgtcccgctgccctactcgctggaagagtgatatcacgttaaaagccggatagcctgatagcgcaacgccatcaggctcgcacgtgctgttctcgtaggccggataaggtgcgacagcgccgccatccggcacgggcatccgggaattatgcctgtcccacatacaaatagatggccaggaagtggcacacgctgccacccagcacaaagccatgccagatggcgtggttataaggtatgcgtttgcaaacatagaaaattacgcccagcgagtaaacgacgccacctaccgccagcagcgtcacgccgcctatcgccagcttaatcgccaactgataaaccactatcagcgacagccagcccattgccagatacgtaaccagcgaaagcactttaaatcggtgcgcaatcgtcaacttgaagaggataccgaatagcgccaggctccagatcacaatcattagtccgcgcgccagcggcgaatccagacctaccagcagaaatggcgtataggttccggcaatgagcagatagatagcgcagtgatcaaatttctttaaccagatttttgcccgctgatgaggaatggcatgataaagcgttgaggcaagaaaaagcaggatcatgctcccgccatataaactgtagctggcgatagccgtcatacccgcattcgcctctaccgcctgaaccaacaacagcaccaggccgacaataccaaataccaatccaatgccgtggctaatactgttggcgatttcctcagccagcgaatatccctgcgtcattaatggtttttgcaccataacttactccggagaaacgttcataacgatgaactgcgcctctagcgtaactgagaatggttccagtgaacacatgttagctaaaataaattcgcaaaattaaattttgtttattattcaataagttaattacaaaaactcaactaacacgcgttcatatttatcaaaggcatttaaaatcaatcacataaaattgcgtctggttgggatagatttcagcaatgacccgtttcagctcatcaagcgacatattttcctgttgcgcatgtttttcgttcagcgtatccagcgtcacagttgacgttcctgtcacttcgattgtgcaaaaatagccatcatcttcgaaccgccccacgcgtagcacatcgcctgctttaaagtgggactcggaggcatcacgaatagtgatggttttacgccctgccagaatgtcattctggaaacgttgaaagaaagtaatgtcgtttggctgcatgtggttatccccctgaatatggccccttgaagtggatgttacgatctgaatgtgttcttgctccgacacgcgagcatcctggaattttgcgtacgctttacatgccacttggtgcagaatgaatgataacagactaaataaattgagattatgcaacaatgagaaaactcaccttgccaaaagattttttatggggcggcgcggttgctgcacaccaggttgaaggcggctggaataaagacggtaaaggccccagcatctgcgacgtgctaaccggcggcgcacacggcgtgccacgcgaaatcacccagaatgtcgttgctggcaaatactatccgaaccacgaggcggtggatttttacggacattacaaagaagacatccgtcttttcgccgaaatggggttcaaatgcttccgtacctctattgcctggacgcgtatcttcccgaatggcgacgaatcccagccaaacgaggccggtctgaaattctacgacgacatgtttgatgagttactcaaatacaacatcgaaccggtcattaccctttctcactttgaaatgccattacatctggtacagcactacggcggctggaccaatcgtaaagtggttgatttctttgtccgttttgctgaagtcgtgtttgaacgctacaaacataaggtcaaatactggatgaccttcaacgaaattaacaaccagcgaaactggcgcgcgccgctgtttggctactgctgttccggcgtggtgtataccgagcatgagaatccagaagaaaccatgtatcaggtcttacatcatcagtttgtcgccagcgcgctggcggtaaaagcggcacgtcgcattaacccacagatgaaagttggctgtatgctggcgatggtcgcgctgtatcctttctcctgtaaaccagaagatgtgatgtttgctcaggagtcgatgcgtgaacgctacgtctttaccgatgtgcagctgcgcggctattacccgtcctatgtgttgaacgagtgggagcgccgcggatttaacatcaaaatggaagatggcgatcttgaagtgctgcgcgaaggcacctgcgattatcttggtttcagttattacatgaccaacgcggtcaaagccgaaggcggtagcggcgatgcgatttccggttttgaaggcagcgtaccgaacccctatgttaaagcatctgactggggctggcagattgacccggtgggcctgcgttattcattgtgtgaactgtacgaacgctatcaaaagccgctgtttattgtcgaaaacggttttggtgcttacgacaaagtagaagaagatggcagcatcaacgacgactaccgaattgactacctgcgcgcccatattgaagagatgaaaaaagcggtgacttacgatggtgtcgacctgatgggctacacgccgtggggctgcatcgactgcgtgtcgttcaccaccggtcagtacagcaagcgctacggcttcatctacgtgaacaagcacgatgacggtacgggcgatatgtcgcgttcgcgtaagaagagcttcaactggtacaaagaggtgattgccagcaacggcgagaagctttaactcctgcacgttacccgccagtcggcgggtaacactttgaacgagtcttaccaggtcttacctattttaaattcccagcgtacatcttccattttggttggcgacttcgcttcctgcattaccgggaagaaggctccggcaccaaaccataatttcagtgaatcgacggcaatattaaatgacggaccaacaacccattcggtagttccagaatggttattaattacgctgccattagacagttttttcgttccagaggcattattgctgtaggcactttccagaccaagatccagcggtaaatcgctaaacatataccgcacctgggtattccactggaattcgttacctcgtttcacgtcctggttaccgcgctcaaatggtccctgatatacaaaacccatatcccctttaatgttaggagtaaataattttgttaaagtgagtgttactcttcctccccaggcgctattcccaggcaaatgattatctccatcttgcccggtgggtagtaatactgccccacctaccgtaacccaaaacggatcacctcttcgctggctcattaaagcataattgacccccaccgattggtcgcccattccctctatgtgctcaggagacagattgtctcgtttgttattgatataggaacccacagttgataattccagtctgtcggtcaaaccgtaacgaatcttcaataaccatatctgggagtaaacatccggacttccatgcccctcgatttgatgatctttatcgcgaaatgagctattcatggcggttaataactttccttccggcaatactgaaccaccagaaatagcggtattaactggtgcacctaatagattactgggattattttctccgttagctgccattgcattcattaatagaaaatatgtcattaatggcagaaatataaatcgtttcattattccctccaggtataaaaaacaaagtgctaagttaataaatatttacgttatttatgcttatctttaatttataatttaaattaataacttgatgaatttaatatacggaaatttttgtaactatattgagaggtaaataacgattccggagagaaactatttgtaaccacatgtaaatataccgtgttatttttattaaataacagcaaggtaaaaatgatgcacaatgaatcattagactctaaaaaaccggtaatttaattctggctaatacactgatacaaacgccaggttgcctgacaggagccaacgatttactgtaatatattgaattagtaacactttgtagcctgaataaggcgctcacactgcatccgacacaaacaaagcgcattttattaacaagctgaaaaggcgccgaagcgcctttagaagacagtcgaatcagtaaattactggtagtcgctaatcggtacgcaggagcagaacaggttgcggtcaccataaacatcatccagacgtttcaccgtcggccagtatttgtctgccacgcctgccgggaatacggcaacttcacggctgtacggatgcgcccactcggcgaccagttcgctctgaatgtgcggcgcgttcaccagcgggttatcttccagcggccagacacccgctttcacctggtcaatctctgcgcgaatagccagcatcgcatcgataaagcgatccagctcggccttaccttcagattccgtcggctctaccatcagcgtgcccgccaccgggaacgacatggttggcgcatggaaaccatagtcgatcagacgcttggcaatatccagctcgctgatgccggtttcttctttcaatgggcgaatatcaagaatacattcgtgcgccacacggccatcgcgaccggtatacagtaccggataggcatctttcagacggctggcaatgtagttagcgttaagaatcgcgacctgacttgcctgcttcaggccttctgcgcccatcatgcggatgtacatccagctgattggcagaatggaggcgctgccgaacggcgccgcagacaccgcgccctgacgggtgagcatcccttcaatttgcaccacgctatgacccggtacgaacggtgccagatgcgctttcacgccgatcggtcccatgcctgggccaccgccgccgtgcggaatgcagaaagttttatgcaggttaagatgcgaaacgtccgcgccaataaagcccggtgaggtaatgccgacctgagcgttcatgttcgcgccgtcaaggtaaacctgaccgccgaactggtgcacaacttcacacacctcacggatcgtttcttcatacacgccgtgggtggacggataggtcaccatgatgcaagaaaggttcgcagcatgttgttctgcttttgcccgcagatcgtccaggtcgatgttgccgttcttatcacaggcgactaccaccacctgcattcctgccatatgtgcagaagcagggttagtgccgtgagcagaggccggaatcaggcagatatcgcgatgaccttcgttgcggctttcgtgatagtgacgaatcgccagcagccccgcgtattccccctgtgcgccggagttaggctgcatacagacggcgtcgtacccggtgagtttcaccagccagtcagaaagctggctaatcatctgatgatatccttcggcctgttccggcgggcagaacggatgcagttcagcgaattccggccaggtgataggaatcatctcggcggcggcgttcagcttcatggtgcaggaacccagcgggatcatcgcctggttcagcgccagatctttacgctccagcgagtgcatatagcgcatcatctcggtttcgctgtggtaacggttaaataccggatgcgtcagaatcgcatcgtcacgcagcatactttgctgaatggaacggctatcaagcgccacgtctttatccagtgtttcaatgttcagaccgtggctgtcgcccagcaaaacattgaacaactgcgccacattctcacgggtggtggtttcatcgagcgtaatacccaccgcgttatgaatatcgctgcgcagattgatctctgccgcttccgcacgcgccagtaccgcagctttatcagccacttccacacacagggtgtcgaagtagtgcgcatgacgcagctttaagcctttctgttgcagacctgccgccagaatatcggtcaggcggtggatacgattcgcaatgcgcttcagaccgaccggaccatgataaacggcatacagactggcgatgttagccagcagtacctgcgaggtacaaatgttggagttcgctttctcacggcggatatgctgctcgcgagtctgcatcgccatgcgcagtgcggtattgcccgccgcatcttttgagacgccgataatacggcctggcatggagcgtttaaattcgtctttggcggcaaagaacgccgcatgcgggccaccgtaccccatcggtacgccgaagcgttgcgcagagccgaaaacaatgtccgcgccctgtttgcccggagccgtcagcagcaccagcgccataaaatcggcggcgacgctgaccacaactttacgggatttcagctcagtaatcagtgcgctgtagtcgtgaatttcgcccgtggtgcctacctgttgtaacagcacgccaaacacatcctggtgatccagtgctttcgccgcgtcatccacaatgacgtcaaagccaaaggtttcggcgcgagtacgcacgacgtccagagtttgcggatggacatcagaggcgacaaagaaccggttggcatttttcagtttgctgacgcgctttgccatcgccatcgcttcagcggcggcggtcgcttcatccagcagcgaggcggaagccatgtccagccctgtcaggtccagcgtcacctgttggaagttgagcagcgcttccagacgcccctgagagacttccggctgataaggagtgtaggcggtgtaccagcctggattttccagcatgttgcgcaggataaccggcggtagctgcacggcggtgtagcccatgccaatgtacgacgtgaagcgcttgttacgcccggcgatggcttttaattccgccagtgcggcatattcggttgccgcctctccaacctgcggcggagtcgcgagctgaatgtctttcggcacaatctgacctgtcagcgcgtttaacgactcggcgccaaccgcattcagcatctcttgttgctgtgcggcgtccggtccgatgtggcgttcaatgaaagcgccgcggttttcaagctggcttaacgtctgtgtcatgggcgatggttcctgaaacgtgcagtgaatcgtgattgtctctaactcaattgcccggtggcgctgacgcttaccgggcctacgcgtgcgaaaacgaatacgcaaaatcattcgcgttgcagtgagtaggccggataagcattagcgccatccggcacaacattattcgtcttctaacaatgcctcatacgcggtggcatccagcagcgattcaagttcgctttcatcgctggctttgattttaaagatccagccaccggtatacggttcgctgttcaccagctccggggagtcgctcagcgcatcgtttaccgccacgatctcgccgcttaccggcgcataaatgtcggacgccgcttttacggactccgccacggcgcagtcgtcgcccgcgcttacggtcgcgccgacttccggcagatcaacaaaaaccatatcgcccaacagctcctgagcgtgttcagtaatgccaacggtgtaagtgccatccgcttctttacgcagccattcgtgttctttgctgtatttcagttctgcgggtacgttgctcatcaattaatctccaaaaaaggatgaatcacgcgacggctttgccgttacgcacaaaaacaggtttagtcacttttaccggcatttcacggttacgaatttgtacaatcgccgtctcgccgatgcccgccggaacgcgcgccagcgcaatgctgtagcccaacgttggggaaaacgtcccgctggtgataatgccttcttgctgattgccctgcgcatcggtaaaacgcaccggcaattcattacgcaatacgcccttctcggtcatcaccagaccgacaagctgctcatggcctttttcacgctgcatctccagcgcctcacggccaataaagtcgcggtcagcaggttcccaggcgatagtccatcccatattagccgccagcggagagataccttcatccatctcctgaccgtacaggttcatgcctgcttccagacgcagcgtgtcgcgcgcgccaagaccgcacggcttcacgcccgcctccaccagcgcacgccagaaatccgccgctttttcattcggcatggcgatttcatagcctgcttcgccggtataaccggtggtggcgataaacaaatcgcccgcctgaacgccgaagaacggcttcataccttctactgcatggcgctgttggtcagtaaacagagtcgccgctttttcctgcgcattcggcccctgtaccgcaatcagcgacaggtcgtcacgaacggtgatgtcgatggcataaggttcagcgtgttgggtaatccaggagaggtctttttcgcgggtggcggagttaacaacgagacggaagaaatcttcagtgaagtagtagacgataaggtcatcaatcacgccgcccgatgcgttaagcataccggagtagagggctttacccgtcttcgttagcttcgcgacgtcgtttgccagcagataacgtagaaactctcgtgtgcggctgccatgaagatcgacaatggtcatatgcgatacatcaaacatcccggcatcggtgcgcacagcgtggtgttcatcaagctgagagccgtaatgcaggggcatcatccagccatgaaaatcgaccatgcgggcgccgcatagcgtgtgttgttcgtacaaaggcgtctgttgggccatcttttcctcgttgaattagcgggggctaacaaccattttcatgggaaatcttcgccacgaaacctggcatcgacgccctttttcctgcgccgacgcaaacgttctcttgctcctgaacttaccaccgaaccaggcgctaaaccataaggctgaatttaccatcacattagcttatgactaaaaaacgccaaaaccccatcagcacaaaaaaccactattacgctaaataacctccataaaaatgaagctgatacgatttatcacaacataaattaatattaaatgtggaaaaaatgtcgaaaatctcgttcgcaaaaaatagtggcattagaaaatataatgcgaaataagcggtgaaattagattatttcaaacgaggaaagccccccggcgcgatagccgggaaagcaaagtgtgacgggtttcaaactcttgctggcgtgcagtcagacgcttaacgaagccattgcggaaggtcgtttagccccattgcctggcgaagcagttggggtttgacgccggggagcgtgtccgccagtttcagtccgatgtcgcgcagcaatttttttgccgggttttcgccggcaaacaggtcacgaaaaccttgcatcccggcaagcatcatcgccgcactatgtttacggctacgctcataacgacggagataaagatgttggccaatgtctttgccctggcgctgaagccggcgcagatcgtccaccagttcggccgcgtccataaagccgaggttgacgccttgccctgccagcggatggatggtgtgcgcggcatcaccgaccaacgccagacgatgcgcggcaaactggcgagcatagcggcccgtcagcggaaaaacctgccgttcgctttccaggcggcataagcccagccgattatcgaaggcgatagtcaacgcctggttaaacgcctcgtcgccgctctgttgcatacgctccgcatcctgcggagaaagcgaccagacaatggaacacagatgcggatcgcttaacggcaaaaacgccagaataccttcaccatgaaacacctggcgagcaaccgcgccgtgcggctcttcggtgcggatagtcgctaccagcgcatggtgacggtagtcccagaaagttaagggaatatccgctttgttacgcagccaggagttggcgccatccgcggcaatcaccagacgcgcggttaacatcgcgccgtcttttaaagtcaggaaggcgtcgttctctccccaggcaacctgctgtaactccgctggcgccattaaggtgatatccgccgcttgctgcgctttttgccacaatgcgtagtgaatgacgctgttttcaacaatatgccccagatggctatatcccatgcttgcgtcatcaaacgtaatacggccaaagctgtctttatcccagacttccataccgtggtagcaacttgcccgtcgcgccacaatgtttgaccatacgccaagacgggtaagcagtttttcgctggcggcattaatcgccgacacccgaagctgaggcggcgcatcgttcgccaacggctgggggacaacgtgatccagtaccgcaacgcgcaaaccgctcccctgcaagccgcaggcgacagccagtcccaccatgcctccgccaactattgctacatcaacactttgcactatttactcctggaaaccggaacaatcaaaaccgtaggccggataaggcgaagccgccatccggtatttttacgaacacgatgccggatggcggcgtgaacgccttatccggcctacagatcggcttaacgcgcaacccaacctaaggtccgctgtgccagcgcatcgcgcgcaggtggtaataattccatcgccattaaaccgatattgcgcccaataaccagcggcgcccaacgatttgcaaacagatggaccagaccgttcgttacgccaatcgtcgtatcccggtcaacctgacgacgctgctgatagcgcgataacacgtgccaggcgccaatatcctcgcccgcgtcctgtgccgcgaccagcgtttccgccaggctcatgacatcgcgcagaccgagattaaacccttgtccggcgataggatgcaacgtctgcgccgcattgccgaccacgacagtccggtgagaaaacactttcgccgccgtagtcagggcaagcggatacgcgctgcgcttaccggcctgagtaattcgccccagccgccagccgaacgcggcctgcaatgcatggcagaactgcgcgtcggaccagctcagcacctcatcgcgctggtcgagcgggtgacaccaaaccagcgaacatcggccatgcgacatcggcaacatcgccagcgggccattgggggtaaaacgttcaaaggcgcgtccctggtgcgggatagcggttgcgacattcgctatcaccgctaactgttcgtaaggctcctgatgccagtcaacgccgcaggctgacgcgagcgcggagtgggtaccgttagccgccaccagcacgctgccagctatcacattgccgttttccagagtgacgttaacctgctgttgggtacgcgacacgctggctacgcgctccgggcagtgcagcgtaacgcctggcgctttacgcaagagcgcaaacagacgcagcccgatatcatgcagctccgcaacgtgccccaacgctgccagactgtagtcctgcgcgtcgagagtcacaaatccggcatggccgcgatcgctgacgtgtacggtgttgattgccgttgcgcaatcggaaatcgcctgccagacgccaattcgcgccagttgctgacaagtgcccgccgccagcgcaatcgctctggcgtcaaagccgggatgaccgtcggcttcaggcgctttcgcttcaatcaggtgtaccggcaacgtcccatgactgaactgagagatggccagcgccagcgtcgcgcctgccatgccgccgccaacgataatgacgctcattgctgccgcgccgccgccattaatgcctcaatgtcatccgccttcttcacaacgccagcggtcaggttttcattaccggtttcggtaatgacaatgtcatcttcaattcgaacgccaatgccgcgatacgcttccggcacgtcggcatccggcgcgatatagaggcctggctctacggtcagcaccatgcccggctccaggatgcgggagcgatccggcccataaacgccgacatcatgaacatccagccccagccagtggctcaagccatgcataaagaaaggacgatgcgcattttcggcaatcagttgatcaacctctccttgcaaaatccccagcttcaccagcccggttatcatgatgcgcacgacttcgccggtcacctcctgaatagaggtaccaggacggaacagtcgcaggctggtctccagcgattccagaacgatgtcataaatttcacgctgggctagcgtaaatttcccgttcaccgggaaagtacgcgtgatatcgcccgcgtaacctttatattcacaacctgcgtcgataagcactaaatcgccgtcgcgcatttcactttcgttttcagtgtaatgcaggatacagccattttcgccgctgccgacaatggtgttataggagggatagcgcgcgccgtggcgattaaattcgtggtgaatttctccttccagctgatactcaaacatccccggacggcatttttccatcgcgcggatatgcgccagcgcgctaatttccccggcgcggcgcaggacagcaatctcttccggcgatttgaacaggcgcatctcatggacgatcggtcgccagtcagtcatggtggccggcgcggtcagattctggcgggagcctttacgcagcttctccagcgcagccagaacaatctcgtcggcatacgcatattcgccctgcgcgtggtacaccacatccagaccattaagcaactgaaagagttgctggttgatttcgctaaacgccagcgcccggtcaacgcccagtttttccggcgcggcatcctgtcctaaacggcgaccaaaccagatttccgccgtcaggtcgcgaacgcggttgaacaaaacgctgtggttgtgggtgtcatcactcttaatcagtaccagcacggcttccggttcgttaaaaccggtgaaataccagaagtcgctactctggcgatacggatattcactgtctgcgctgcgcgtcgcctccggcgcggcaaagatcagcgcggcgctgccgggctgcatttgcgccagtaatgcctggcgacggcgttggtattcctgctgagtcatgacatggcctccatttcgttttttcttagtgtagcgtcggtttacgcacttccggcgcggtcggctgttggcgcgtgaaagtgtcatgacataacagcgccgcaacacggacatattcgatgatctcttcgagcgacatctccagctcttcctgatcttcgctctcatcataaccaagctgcgcaatattacgcaggtcgtcaatcgcttcacccgtttcgccggtgactttatcaagtttaggctgcgttacgccgaggccaagcaaaaagtggttaacccacccggctaaggcatctgcgcgatcgaatacgctgacatcgtcgccttcaggcagataaagctgaaaaagaaagccgtcgtcttccagcgcgtcgctggtcgccgcgtgcattttgcgcagcgcctgagcaagctcatgcccgaaggccagaccttcgttcgtcaggtcgtgcaacagcggctgccatgagctgtcgttgttgccgccgcaaatcatcccgctgattaaaccatgcatttcagccggggtcagaccggccccttgttgattcaaaaaccggttcatttcgttgtaaccaggcatttcgttctgtatagacataagcattcgtcatcaaagggaggatattcatgatatgctaccactttggaccctggtgaaccagaaaagggcttgtatcttcacaccagggtagctatagtgtcgccccttcgcggaccctgggtctggagacgaaggcagcgcagtcaatcagcaggaaggtggcatgtctgcacaacccgtcgatatccaaatatttggccgttcactgcgagtgaattgcccgcctgaccaaagggatgcgttgaatcaggctgcggacgatctgaatcagcggttgcaagatctgaaagttcgcactagagtcacaaatactgagcagttggttttcattgccgcattgaatatcagctatgagttaactcaggaaaaagcgaagacccgcgattacgcggcgagcatggaacaacgtattcggatgctacaacagaccatcgaacaggcgttgcttgatcaaggtcgcataaccgaaaaaacgggccaaaactttgaataacacttttcgctttactatggtaaagtgattgtgaaaacagaatttctctgagatgtttgcaagcgggccagtcccctgagccgatatttcataccacaagaatgtggcgctccgcggttggtgagcatgctcggttcgtccgagaagccttaaaactgtgacgacacattcaccttgaaccaagggttcaagggttacagcctgcggcggcatctcggagattccccttctgactggcgacagccatgacgcaacttcccgaactctctttatcacgacaagaaatccgccggatgattcggcaacgtcgccgtgcgctaacgccagagcagcaacgccgttttggtcaacaggccgccgcccgaatgctcagctttcctcccgtcgtgatggcgcacactgtcgccgtgtttctctcctttgatggcgaactcgacacccagccgctgattgaacagctatggcgagcgggcaagcgcgtctaccttccggttcttcatcccttcagccctggcaacctcctgttcctgcactattatccgcagagtgtgctggtgaccaaccgcttaaagattcaggagccacggcttgatgtccgcgacgtattgccgctggcaaagctggatgtgctggtaacgccgttagtcgcgtttgacgaagacgggcagcgcctggggatgggcggcggattttatgaccgtacgttgcaaaactggcagcagcataagatcctacctgtgggctacgcgcatgattgccagttagtggaaaagttgccggttaaagagtgggatatcccgctgcctgcggtggtgacgccgtccaaaatttgggagtggtagccgtgttttgtcgattgacagcgtcgcttttttgacctaaatttctcggtgaagggtgagggaggcgaacctccctcctgcgtactcactgttaatatgctgggcaagcgatgattaacaggatcagcagcatgatgacgtatctcatcatcgtccctttcctttttagagcccctgcctcggtaggggctttcccgtttcagcgctatgctgagcccttatcgtaaattccttttattgctgtacaacacgcaacgctgcctttaattaccaattgcggcaaggctcgaaaacagaatgtatgcgttacacgaagagatgttgaggcagggaaaccagagaaaggatgggcaggtcatctcctgcccatttagcggaaattagtacagcagacgggcgcgaatggtgcccggaatcgccttcatcgccagcagcgctttctccgccacatcgccatcggcttctatatcaattaccacataccccattcgggcggaggtttgcagatactgtgcggcaatgttaacgccctgctcggcaaagatctggttaagcgcggtcaatacgcccgggcggttttcgtggatgtgcatcaggcgacgaccaccgtgcagcggcagcgacacttccgggaagttcacggcggacagcgtcgagccgttatccgagtacttaatcagttttcctgcgacttccagaccgatgttttcttgcgcctcctgcgtcgagccgccgatatgcggcgtcaggatcacgttatcgaattcgcacagcggagaggtaaacggatcgctattagtggccggttccgtcgggaagacgtcgatagccgcccccgccagatgtttcgtcgccagcgcgtcgcacaaagccgggatatctaccaccgtaccgcgcgcggcgttaatcagcagcgaacccggcttcatcagggcaatctcttttgcgcccatcatgtttttggtggaggcgttttcaggtacgtgcagactgaccacatcgctcatattcagcaattcagacagatgctgcacctgagttgcattaccgagcggcagtttattttcaatatcatagaaatagacatgcatccccagcgattccgccagaatgcccaactgcgttccgatatggccgtaaccgataatgccaagctttttaccgcgcgcttcgaacgatcccgccgccagtttattccatacgccgcggtgcgctttggcgttcgcttccggcacgccgcgcagcagcagcaatagctcgccaatcaccagctccgccacggaacgggtattcgagaatggcgcgttaaagaccggaataccgcgttttgccgccgcatttaaatccacctggttggtgccgatgcaaaaacagccaatcgccaccagcttctctgcggcgttaatcacttcttctgtcagatgagtacgggatcgcagaccgatgaagtgggcatcgcggatggacgctttcaactgttcagcgtccagcgcgcccttgtgatattcaatgttggtgtaacctgccgcacgaaggctttccagcgccttttgatgcaccccttcaaccagcagaaatttaattttatctttctccagcgatacctttgccatttccccgatcctgtcttttttgccatctgatgttgtgtgtggatttgcatccgtccttcaacatatcaaaaaaaattatcacggcaatatgaacgtttgcgccagcgtcgtgaaggaatcgcatacagcgggaaatagcagatgaaaataccgggaataactttttctttggagggatcggcagggcaaacgattaaacgtgatacatgtcaccaaatttgccctgaccgaattttttacgcggcaggaaatacgcctggcgggatcattttacgatggttttcaccccgtccggcgtgccgatcagtgcgacatcggcgccacggttggcgaacaaccctacggtcacgacgcccggaatcgcgttaatggcgttttccagcgcgatgggatcaaggatttccataccataaacatccagaatcacgttgccgttatccgtgaccacgttctgacggtactccggacgcccgcccagcttcaccagttgacgagcgaccgcgctgcgcgccatcggaatcacttcgaccggcaacgggaatttgccaagaatatccacctgtttagaggcatccgcaatacagataaatttctctgccacggaagcaataattttctcacgggttaatgccgcgccgccgcctttgatcatctgcatatgaccgttgatttcgtccgcgccgtcgacatagatgcccaggctatccacttcgttgagatcaaacacatgaataccgaggcctttgagtttttcagtcgaggcgtccgagctggagaccgcgccttcaatctggcctttcattgtgcccagcgcatcaataaagtgtgcggccgttgagcctgtaccaacgcccacaatggtgccgggctgtacatactgaagtgccgcccatcctaccgcttttttcagttcatcctgcgtcatagatcgtttcgcctgtggtgtgaaaatacagccgcattatagaacattgtcgggaaaaatctccgtgtccgtacacaggctacggatttcatctgtaccgacggcaaatttatgtcatagtgcggaaaaaaataacaggagcatgacacaacaatgaaacgtccggactacagaacactacaggcgctggatgccgttatacgtgaacgaggattcgagcgcgccgcccagaagctgtgcatcacgcaatccgccgtctcacagcgcataaaacagcttgagaatatgttcggacaacctttgttggtgcgtaccgttcctcctcgccccacggagcaagggcaaaaattactggctctgctgcgtcaggttgaactgctggaagaagagtggctgggcgatgaacaaaccggctctacgccgctgctgctgtcgctggcggttaacgccgacagtctggcgacctggctgcttccggcgctggcgccggtactggcggactcccctatccgtctcaatttacaggtggaagatgaaacgcgcacgcaagaacgtctgcggcgcggcgaggtggtgggcgcggtgagtattcagcatcaggcgctacccagttgcctggtggacaaactgggcgcactcgactatctgtttgtcgcgtcaaagccgtttgccgagcgctatttccccaatggcgttacccggtcgtcgctgctaaaagcgcccgccgtcgcgttcgaccatctggatgatatgcatcaggcctttttgcaacagaatttcgatctaccgcccggcagcgtgccgtgccatatcgttaattcatccgaagcatttgtacagcttgcgcgtcagggcacgacctgctgcatgatccctcacctgcagattgagaaagagctggaaagcggcgagttgatcaacttaacgcctggtttgctgcagcgccggatgctttactggcaccgctttgccccggaaagccggatgatgcgcaaagtgaccgacgcgctgctggagtacgggcacaaggtgctgcgtcaggattagcctctctatgaatgccggatggcggcgtgaacgtcttatccggcctgcatgacccattattccctcgtcacttctttgaagttcatcacaaaatcattgcgttcaggcggcaaaaaacgacgcgccattggctattttttgctggcgacaaggcgattcaaaacgctcaccgtattagcaaatcttcatttcaatgcgtaatacggagcaaaaaacgagaacaccgggagaaaacgcggcctggaagcgcccaggccgggtgagattactgcgtgctggcggccgttgtcgacgtctgccctgttccaggttcaagctggaataccacatcgacctgatcgtcgaactgaatggtcggctgctcgtaagtttcctgcgcagataccggcgcagcatctgcggctttcatcattcgcaccaccggactcggctgataattagagacatggtaacgaacgctgtaaaccggccccaatttgctgttaaaaccggctgccagcgcttgcgcctgatgaatcgcgtcatcaatggcggctttgcgggccttgtctttataggcgtccggttgcgccacgcccagcgataccgaacgaatctcgttcagacccgccttcagcgcgccgtccagcagagaattaagtttatctaactgacgcagcgtcacctcaacggttcgcaccgcacgataccctttcagaatgcttttaccgttttggtaatcataatccggctgcgtgcgcagattcgccgcgctaatgtcttttttcgcaatctgattttgctcaaggaaggaaagatattgcgccacgcgctcatcggcctgcttcttcgccgtcgccgcgtccttcgccgcgacgttcacttcaatcgctaaggtggcgatatcaggcacagcatcgacgcttgccgtaccggaagtcacgatgtgcgggccttccggcaattcgcttgcctgcgccgacattgcacttaaacccactaatgccgccagggccatcactttgaacttcacagtctctcctccatattgcagtcattgccctgatatacagggcgcatgcaggcaagcttagcggatatcggcctgttgtccatcagacaacgcttagttgaaaagcgcgtgcatatgcgcgacgccttcccgcgccagttggaaggcgataagccacatcaccaccccaaccagaatgttgataatgcgttgagctttcgccgtacgcagtcgaggcgcaagccaggccgccagtagcgctaacccaaaaaaccataagaacgacgcgctaatcgtgccgagggcgaaccagcgctttggctccatagccagttgtccgccgagactgcccaacacgacaaacgtatccagataaacgtgcggattcagccacgttaccgccagcatcgtagcaataattttccagcgcccctgcttcataacctcggcgctggccagctccagattactgctcattgccgttttcagcgcgccaaaaccgtaccataacaagaacgcgaccccgccccatgtgaccagcgccagcagccacggcgactgcatcagcaacgcgctaccgccaaaaataccggcgctaatcaggactaaatcacttaacgcgcaaagcagcgctatcatgaggtggtactggcgacgaattccctgattcatcacaaacgcattttgcgggccaagcggaaggatcatggcggcgccaagggcaaacccttgaaaataataagatatcacgttaactaccctgagctgtttttcttaaaggcagactatagcgcgggaatattattagcggaaattgataattttaatcactaataagaaaagctaataaagagactgaataacggatagcggctacgcttatccgctcaataaccagagaatactggaggcggataagcgcagcgccggcaggcagcgcgggagaaaattactccgcggcgttatctttcacgcgtttaaaattgacgtccatctgcgggtacgggaagctaataccagcggcgtcgaattcacgtttaatacgttccagcacgtcccagtagacattttgcaggtcgctgcttttactccagacacgcaccacaaaattaattgatgaggcgcccagctcattcaaacgcaccgtcatttcgcgatcttttaaaatacgatcgtcggactcgataatcgtcgttagcagctgtttcacctgatcgatatccgaatcgtaggccaccccaataatgaattcgttacggcgaaccggctcacgagaatagttgatgatatttcccgcgataattttgccattcggaatcacaataattttgccgtctaccgcgcgcattgtcgtggaaaagatttgcacgttcagtaccgtaccggcaacgccgcccaaatcgacatactcaccggcgcggaacggacggaacataaccagcaataccccagccgcaaggttagaaagcgatccctgtaatgccaggccaacggctaaaccagcggcgcccagtacggcaataaccgaggcggtttgaacccccacgcgacccagagccgcaatcagcgtaaaagcgataaccccatagcgcaccagcgcagaaagaaagtcggccactgtcgcatcaatatgacgcgcacgcatcagacgatttaccgtattggagatcacgcgcgctacaatcaagccgatgatgataatagcgatagccgcaacaatattcacagcatagctgagcaataacgcctggttgcgtaccagccaggtgcccgcaccatttatgctgtcgacaacattcaaatcttccattcaatattccttggtcatagcaaaacaagcaaatgagatcattctcacgaaaagaactttttaaaggtaaacaaaaacagaagaatatgccatttttcggcatcatcccaaaaaaggcaggtacattgtgagttggccggatgaaagcgctaactaacgccgctctccggaaataacgataaaaaaatggcttcccaagggaagccatttcaatcagcagactatattacagaacgtcaatcgcgttcagttctttaaatgctttttccagacgagcgatcatcgaagtctggccagcacgcagccatacgcgcgggtcatagtatttcttgttcggctgatcttcgcctttcgggttgcccagctgaccttgcagatacgcttcgttttctttgtagtagttcagaacaccttcccaggttgcccattgggtatcggtatcgatgttcattttcactacgccgtagcttacggagtctttgatttcctgagcagtagaaccggaaccgccgtggaaaacgaagttcaggctgttgtgcggcaggttgtgtttcttagaaacatagtcctgagaatcacgcagaatggtcggggtcagaaccacgttacccggcttgtaaacgccgtgtacgttaccgaaggaagcggcaatggtgaaacgcgggctgattttgctcagttcagtgtacgcgtaatcaacgtcttccggctgggtgtacagagcagaagcgtccatgtggctgttgtccacgccgtcttcttcaccaccggtgcaacccagttcgatttccagagtcatgccaattttggacatgcgcgccaggtatttggagcagatttcgatgttttcgtgcagagactcttcagacaggtcaatcatgtgagaagagaacagcggtttaccggtagccgcaaagtgtttttcacccgcgtccagcaggccatcgatccacggcagcagtttcttcgcgcagtggtcagtgtgcaggataaccggaacgccgtagtgttcagccatctggtgaacgtgatgcgcgccagagatagcgcccaggattgccgcgccctgaggtacgtcagttttcacgcctttacccgcgatgaaggaagcgccgccgttggagaactgaacgatgaccggtgctttaacttttgcagcggtttccagaacagcgttgatggaatcagtgcccacgcagttaactgccggcagagcaaaattgttttcttttgctacctggaacactttctgtacgtcatcaccagtgatcacgcctggttttacgaaatcaaaaattttagacatgtttcgttgtcctgtatcgtcgggctttgggaaaaaacacgggccgccctgaatgtcagatcggcgataaatcaacgggcaggaatccctgcccgtaacgattacttcttagcgcgctcttcgagcatcgctacggctggcagaactttaccttccacgaattcgaggaatgcgccgccgccagtagaaatgtaggaaattttgtcagcaatgccgaacaggtcgattgccgccagggtgtcgccgccgccagcgatggaaaacgcttcgctatcagcgatggcattcgccacgatttcagtccctttacggaagttcgggaactcaaacacgccaaccgggccgttccacagaatggttttggcattcttgaggatttcagccagctgctgagcggaagcatcgccgatatccaggatctgctcgtcttctttcacgtcgttaacggatttcagagtcgccggtgcggtttcggagaactcggtggcaacgcgaacatcggtcggaaccgggatatcgcaagtggtcagcagacgttttgcttcgtcaaccaggtcagcttcgtacagggatttaccgacgctgtggccctgagcggcaacgaaggtgttggcgataccgccgccgacaatcagctggtcagcgattttagacagggaatccagaacggtcagtttggtagatactttagaaccaccaacgatagccaccatcggacgagccggttctttcagcgctttacccagcgcatccagttcagcggccagcagcgggcctgcgcacgcaacatcagcaaatttgccgataccgtgggtagaagcctgcgcgcggtgcgcagtaccaaaggcgtccatcacgaatacgtcacacagggcggcgtattttttagacagcgcttcgtcgtctttcttttcgcctttgttaaagcgaacgttttccagaaccaccagctcaccttcggccacgtcaacgccgtccaggtaatctttgaccaggcgaaccgggttagacagtttgtctttcaggtagttaacaaccggcagcagagagaattcttcgttgtactcgccttcggtaggacgacccaggtgggaagttaccatcactttcgcgccctgtttcagagccagttcgatggtcggcagagaagcgcggatacgcgcgtcgctggtcactttcccttctttaacaggtacgttcagatccgcacggataaaaacgcgtttcccggccagatccagatcggtcatcttaattacagacatggtgaatcctctcaatgatgcttaaagttttgtcgacgctgacgcgtcgagcctgaaaccaactgcggccatcgctaacgtggtgtcgagcatcctgttagcaaagccccattcattatcgcaccagaccagcgtcttgatcaggtgggcgccactgacccgggtttgcgtgccatcaacaatggcgctgtgcgggtcgtggttaaaatctatcgagaccaacggtgattccgtatagtcaactataccatgaaatgcaccttgtgctgctttttgcagcaactggttgacttcactggcttttactggttttttcaccgttacgcttaaatcgatcgccgtcacattaatggttggaacgcgcaccgcaatcgcctcaaaacggtcgttaaactgcgggaatatacgcgtaatgcctgccgccagttttgtatctaccgggataatcgactggctggccgcgcgcgtgcgccgtagatcggagtgatacgcgtcgatcacctgctgatcgttcatcgcagagtggatcgtcgtgacggtaccagactcgatgccgtaagcatcatccaacaatttaatgacgggaattatgcaattcgtggtacaggacgcgtttgagacaatacgatgttccgcacgcagttggttctggttcacgccaaaaacgacggtggcgtcaagatcgttgctgcccggatgagaaaagagcactttcttcgcgccagcggcaatatgcgcctcgccatgctcccggttgccatatacgcccgtacaatccaacacaacatccacgcccagttcgcgccacggcagatccgccagcgttctttcatgcagaatacgaatgacatcgtcaccgacaaaaagctgctcgcgctcgtggcgaacctcccatgcaaaacgcccgtggctggtatcgtatttcaacaaatgcgccatgcctgcggcatccgccagctcgttgatggccaccacggtaatttccgcgcgacgtccggattcatacaaagcacgaaccacgttacgcccgatgcgaccaaagccattaatcgctatgcgtacggtcataggtctcctgcaaggctatcccgattcagatgaggctgacagagtaatgcagctcatcgtcgagtaaaaccttacctgtcgcaaactgcgactgattggttaattgtcgaacatttaattaactgaaacgcttcagctagaataagcgaaacggggaataaaaggaatgtttgtccagtcgaagaagacagttatctgacctgcatcacatttcatggccgcttacgctgcaatttattccatatttaagaatcaccagtacatccgtcagatcttttcatcgtcgcgtcacaaatactgatttatatcagaaagcgctgtcgccagcgtctatattatcagcgccacgtccgagtctcggagtcctgtaacgatgactgtatctcaccacaatgcctctacagcgcgcttttacgcgcttcgtctgcttcccggccaggaagtgttttcccaattacacgcctttgtgcaacagaaccaattacgtgccgcctggatagcagggtgtaccggcagtctgaccgatgttgcgctgcgttatgccgggcaagaggcgaccacatcgctcaccggcacgtttgaagttatctcgctaaacggcacgcttgaattgaccggcgagcatctgcatctcgcggtatcggatccctacggggttatgctcggcggccatatgatgccagggtgtaccgtgcgtaccacgctggaactggttatcggcgagctgccagcgctgacgttcagccgtcaaccgtgcgccatttccggttatgacgaactgcatatttcttcccgttaattgacgactctttaagaggtactttatggcgcgtcgcccgttttccagccagtccctggtgctgattgtcatcgctattgccatcaatatgattggcggacagcttattagcatgttgaagctgcctatttttctcgactcgatcggcaccttaattagcgcggtgctgttagggccgttcatcggcatgttgactgggcttctaaccaacttgctgtgggggctgcttaccgatcctatcgctgccgcgtttgccccggtagcgatggttatcggtctggtcgccgggtggctggcgcgcgcaggctggtttcgtaccctgcccaaagtgatcgtcagcggggtcgtcattacgttagcggtgacgctggtcgccgtaccgcttcgtaccgcgctttttggcggcgttaccggcagcggcgctgatttattcgtcgcctggatgcattcaatgggccaaaacctggtggagtcggtcgcgattaccgtcataggcgctaatctggtcgataaaattctgacggcgatcatcgtttgggtgctgctgcgtcagctaccgttacgtacgacacggcattttcctgcgatgtcagccgtacgctaaatgcatccgtttacctcgttaaccttatgggcgctggcggcctgcaccacgctgctactccctgcgcagaccgtgctcccggtttatagcgcggcggccttcctctgtctgctggcgctgaaatcaacgcggcggcgggcgaagtatgtcgcctggctgatgctgtctttagggtttgggctatggctggtacatggcggttggctaacggaatggataagcgggcagcctcgcgatccgcagcgctgggtatatgccgttacgctatggctacgtctgctggcgatcgtgtcgacgtcgcagctatggatgcagtatgtgccggttcagcggtttattcgcgccctgttcgcttcacgtctgccgcccggcatcgcttacctgttcgctggccctctgctggtcgtcgaacagctcaaacgacaactgacgatcgttcatgaagcccagcgcgcgcgtggcgtaccgctggatgaaggctggtatcagcggctacgggcaatgcctgcgctgatcgtgccgcttacgcaaaatgcgcttaacgatctgacaatacgcggcgcggcgttggatatgcggggggttcggctgcatcgagcccgaaccacgctgtgggcgccgaaagatagcgtgttacaacgggttgcgcggtatggcatggtactgctaatactggcggaagcgggagtatggatatggttacgttagagcagtttcgttatcttccgtccgatgcgacacgcccgccggcatgttttgatttccactattcaacacccggaatagtggcgatagtcggcgataacggcagcggaaaaagtacgctggcgcaactgatggctggctggtatccggattatctccccggtgatattgacggcacaggcttactgcttggcgtccctatcgggcggctcccgctggtagaacagtcgcccaccatccaattggtgcagcaatcgccttatttacagctttccggctgtacctttagcgtagaggaagaggtggcgtttggcccggagaatctcggcctccatgaagcggagattctacggcgcattgacgaggcgctgaccctgacaaactgccagtcgttacgccatcgccatcccggcacgctctccggcggcgaaacgcagcgggtagtaattgccagcgcgcttgccatgcagcccagactgttaattcttgatgaagccttcagtcggctgacgtcagcggccaccgggatgctgctggaacggttacaacagtgggcgctggaacgtcattctctcattgtgctttttgagcgtaatcattttccttttctgacgcgatgccagcgggtatggcaattgcgcgacgg
